United States Patent Application Publication US 2024/0131133 A1 - sequence listing, part 4

SEQ ID NO: 80054 - protein, 9 aa, synthetic construct
  source 1..9: note = Seed: LVVVGAGDV (KRAS G13D)
LVVQGSGDI

SEQ ID NO: 80055 - protein, 9 aa, synthetic construct
  source 1..9: note = Seed: LVVVGAGDV (KRAS G13D)
LVVQGSGDL

SEQ ID NO: 80056 - protein, 9 aa, synthetic construct
  source 1..9: note = Seed: LVVVGAGDV (KRAS G13D)
LVVQGSGDV

SEQ ID NO: 80057 - protein, 9 aa, synthetic construct
  source 1..9: note = Seed: LVVVGAGDV (KRAS G13D)
LVVRGKGDA

SEQ ID NO: 80058 - protein, 9 aa, synthetic construct
  source 1..9: note = Seed: LVVVGAGDV (KRAS G13D)
LVVRGKGDQ

SEQ ID NO: 80059 - protein, 9 aa, synthetic construct
  source 1..9: note = Seed: LVVVGAGDV (KRAS G13D)
LVVRGKGDS

SEQ ID NO: 80060 - protein, 9 aa, synthetic construct
  source 1..9: note = Seed: LVVVGAGDV (KRAS G13D)
LVVRGRGDA

SEQ ID NO: 80061 - protein, 9 aa, synthetic construct
  source 1..9: note = Seed: LVVVGAGDV (KRAS G13D)
LVVRGRGDG

SEQ ID NO: 80062 - protein, 9 aa, synthetic construct
  source 1..9: note = Seed: LVVVGAGDV (KRAS G13D)
LVVRGRGDQ

SEQ ID NO: 80063 - protein, 9 aa, synthetic construct
  source 1..9: note = Seed: LVVVGAGDV (KRAS G13D)
LVVRGRGDS

SEQ ID NO: 80064 - protein, 9 aa, synthetic construct
  source 1..9: note = Seed: LVVVGAGDV (KRAS G13D)
LVVSGAGDA

SEQ ID NO: 80065 - protein, 9 aa, synthetic construct
  source 1..9: note = Seed: LVVVGAGDV (KRAS G13D)
LVVSGAGDF

SEQ ID NO: 80066 - protein, 9 aa, synthetic construct
  source 1..9: note = Seed: LVVVGAGDV (KRAS G13D)
LVVSGAGDI

SEQ ID NO: 80067 - protein, 9 aa, synthetic construct
  source 1..9: note = Seed: LVVVGAGDV (KRAS G13D)
LVVSGAGDL

SEQ ID NO: 80068 - protein, 9 aa, synthetic construct
  source 1..9: note = Seed: LVVVGAGDV (KRAS G13D)
LVVSGAGDM

SEQ ID NO: 80069 - protein, 9 aa, synthetic construct
  source 1..9: note = Seed: LVVVGAGDV (KRAS G13D)
LVVSGAGDS

SEQ ID NO: 80070 - protein, 9 aa, synthetic construct
  source 1..9: note = Seed: LVVVGAGDV (KRAS G13D)
LVVSGAGDV

SEQ ID NO: 80071 - protein, 9 aa, synthetic construct
  source 1..9: note = Seed: LVVVGAGDV (KRAS G13D)
LVVSGFGDI

SEQ ID NO: 80072 - protein, 9 aa, synthetic construct
  source 1..9: note = Seed: LVVVGAGDV (KRAS G13D)
LVVSGFGDL

SEQ ID NO: 80073 - protein, 9 aa, synthetic construct
  source 1..9: note = Seed: LVVVGAGDV (KRAS G13D)
LVVSGFGDV

SEQ ID NO: 80074 - protein, 9 aa, synthetic construct
  source 1..9: note = Seed: LVVVGAGDV (KRAS G13D)
LVVSGGGDA

SEQ ID NO: 80075 - protein, 9 aa, synthetic construct
  source 1..9: note = Seed: LVVVGAGDV (KRAS G13D)
LVVSGGGDI

SEQ ID NO: 80076 - protein, 9 aa, synthetic construct
  source 1..9: note = Seed: LVVVGAGDV (KRAS G13D)
LVVSGGGDL

SEQ ID NO: 80077 - protein, 9 aa, synthetic construct
  source 1..9: note = Seed: LVVVGAGDV (KRAS G13D)
LVVSGGGDV

SEQ ID NO: 80078 - protein, 9 aa, synthetic construct
  source 1..9: note = Seed: LVVVGAGDV (KRAS G13D)
LVVSGNGDF

SEQ ID NO: 80079 - protein, 9 aa, synthetic construct
  source 1..9: note = Seed: LVVVGAGDV (KRAS G13D)
LVVSGNGDI

SEQ ID NO: 80080 - protein, 9 aa, synthetic construct
  source 1..9: note = Seed: LVVVGAGDV (KRAS G13D)
LVVSGNGDL

SEQ ID NO: 80081 - protein, 9 aa, synthetic construct
  source 1..9: note = Seed: LVVVGAGDV (KRAS G13D)
LVVSGNGDM

SEQ ID NO: 80082 - protein, 9 aa, synthetic construct
  source 1..9: note = Seed: LVVVGAGDV (KRAS G13D)
LVVSGNGDV

SEQ ID NO: 80083 - protein, 9 aa, synthetic construct
  source 1..9: note = Seed: LVVVGAGDV (KRAS G13D)
LVVSGNGDY

SEQ ID NO: 80084 - protein, 9 aa, synthetic construct
  source 1..9: note = Seed: LVVVGAGDV (KRAS G13D)
LVVSGPGDI

SEQ ID NO: 80085 - protein, 9 aa, synthetic construct
  source 1..9: note = Seed: LVVVGAGDV (KRAS G13D)
LVVSGPGDL

SEQ ID NO: 80086 - protein, 9 aa, synthetic construct
  source 1..9: note = Seed: LVVVGAGDV (KRAS G13D)
LVVSGPGDV

SEQ ID NO: 80087 - protein, 9 aa, synthetic construct
  source 1..9: note = Seed: LVVVGAGDV (KRAS G13D)
LVVSGSGDA

SEQ ID NO: 80088 - protein, 9 aa, synthetic construct
  source 1..9: note = Seed: LVVVGAGDV (KRAS G13D)
LVVSGSGDI

SEQ ID NO: 80089 - protein, 9 aa, synthetic construct
  source 1..9: note = Seed: LVVVGAGDV (KRAS G13D)
LVVSGSGDL

SEQ ID NO: 80090 - protein, 9 aa, synthetic construct
  source 1..9: note = Seed: LVVVGAGDV (KRAS G13D)
LVVSGSGDV

SEQ ID NO: 80091 - protein, 9 aa, synthetic construct
  source 1..9: note = Seed: LVVVGAGDV (KRAS G13D)
LVVSGTGDI

SEQ ID NO: 80092 - protein, 9 aa, synthetic construct
  source 1..9: note = Seed: LVVVGAGDV (KRAS G13D)
LVVSGTGDV

SEQ ID NO: 80093 - protein, 9 aa, synthetic construct
  source 1..9: note = Seed: LVVVGAGDV (KRAS G13D)
LVVSGVGDI

SEQ ID NO: 80094 - protein, 9 aa, synthetic construct
  source 1..9: note = Seed: LVVVGAGDV (KRAS G13D)
LVVTGAGDI

SEQ ID NO: 80095 - protein, 9 aa, synthetic construct
  source 1..9: note = Seed: LVVVGAGDV (KRAS G13D)
LVVTGAGDL

SEQ ID NO: 80096 - protein, 9 aa, synthetic construct
  source 1..9: note = Seed: LVVVGAGDV (KRAS G13D)
LVVTGAGDV

SEQ ID NO: 80097 - protein, 9 aa, synthetic construct
  source 1..9: note = Seed: LVVVGAGDV (KRAS G13D)
LVVTGFGDI

SEQ ID NO: 80098 - protein, 9 aa, synthetic construct
  source 1..9: note = Seed: LVVVGAGDV (KRAS G13D)
LVVTGFGDL

SEQ ID NO: 80099 - protein, 9 aa, synthetic construct
  source 1..9: note = Seed: LVVVGAGDV (KRAS G13D)
LVVTGFGDM

SEQ ID NO: 80100 - protein, 9 aa, synthetic construct
  source 1..9: note = Seed: LVVVGAGDV (KRAS G13D)
LVVTGFGDV

SEQ ID NO: 80101 - protein, 9 aa, synthetic construct
  source 1..9: note = Seed: LVVVGAGDV (KRAS G13D)
LVVTGGGDL

SEQ ID NO: 80102 - protein, 9 aa, synthetic construct
  source 1..9: note = Seed: LVVVGAGDV (KRAS G13D)
LVVTGNGDI

SEQ ID NO: 80103 - protein, 9 aa, synthetic construct
  source 1..9: note = Seed: LVVVGAGDV (KRAS G13D)
LVVTGNGDV

SEQ ID NO: 80104 - protein, 9 aa, synthetic construct
  source 1..9: note = Seed: LVVVGAGDV (KRAS G13D)
LVVTGRGDA

SEQ ID NO: 80105 - protein, 9 aa, synthetic construct
  source 1..9: note = Seed: LVVVGAGDV (KRAS G13D)
LVVTGSGDI

SEQ ID NO: 80106 - protein, 9 aa, synthetic construct
  source 1..9: note = Seed: LVVVGAGDV (KRAS G13D)
LVVTGSGDL

SEQ ID NO: 80107 - protein, 9 aa, synthetic construct
  source 1..9: note = Seed: LVVVGAGDV (KRAS G13D)
LVVTGSGDV

SEQ ID NO: 80108 - protein, 9 aa, synthetic construct
  source 1..9: note = Seed: LVVVGAGDV (KRAS G13D)
LVVVGAGDA

SEQ ID NO: 80109 - protein, 9 aa, synthetic construct
  source 1..9: note = Seed: LVVVGAGDV (KRAS G13D)
LVVVGAGDI

SEQ ID NO: 80110 - protein, 9 aa, synthetic construct
  source 1..9: note = Seed: LVVVGAGDV (KRAS G13D)
LVVVGAGDL

SEQ ID NO: 80111 - protein, 9 aa, synthetic construct
  source 1..9: note = Seed: LVVVGAGDV (KRAS G13D)
LVVVGAGDM

SEQ ID NO: 80112 - protein, 9 aa, synthetic construct
  source 1..9: note = Seed: LVVVGAGDV (KRAS G13D)
LVVVGFGDV

SEQ ID NO: 80113 - protein, 9 aa, synthetic construct
  source 1..9: note = Seed: LVVVGAGDV (KRAS G13D)
LVVVGGGDA

SEQ ID NO: 80114 - protein, 9 aa, synthetic construct
  source 1..9: note = Seed: LVVVGAGDV (KRAS G13D)
LVVVGGGDI

SEQ ID NO: 80115 - protein, 9 aa, synthetic construct
  source 1..9: note = Seed: LVVVGAGDV (KRAS G13D)
LVVVGGGDL

SEQ ID NO: 80116 - protein, 9 aa, synthetic construct
  source 1..9: note = Seed: LVVVGAGDV (KRAS G13D)
LVVVGGGDM

SEQ ID NO: 80117 - protein, 9 aa, synthetic construct
  source 1..9: note = Seed: LVVVGAGDV (KRAS G13D)
LVVVGGGDV

SEQ ID NO: 80118 - protein, 9 aa, synthetic construct
  source 1..9: note = Seed: LVVVGAGDV (KRAS G13D)
LVVVGKGDA

SEQ ID NO: 80119 - protein, 9 aa, synthetic construct
  source 1..9: note = Seed: LVVVGAGDV (KRAS G13D)
LVVVGKGDH

SEQ ID NO: 80120 - protein, 9 aa, synthetic construct
  source 1..9: note = Seed: LVVVGAGDV (KRAS G13D)
LVVVGKGDQ

SEQ ID NO: 80121 - protein, 9 aa, synthetic construct
  source 1..9: note = Seed: LVVVGAGDV (KRAS G13D)
LVVVGKGDS

SEQ ID NO: 80122 - protein, 9 aa, synthetic construct
  source 1..9: note = Seed: LVVVGAGDV (KRAS G13D)
LVVVGKGDT

SEQ ID NO: 80123 - protein, 9 aa, synthetic construct
  source 1..9: note = Seed: LVVVGAGDV (KRAS G13D)
LVVVGNGDA

SEQ ID NO: 80124 - protein, 9 aa, synthetic construct
  source 1..9: note = Seed: LVVVGAGDV (KRAS G13D)
LVVVGNGDI

SEQ ID NO: 80125 - protein, 9 aa, synthetic construct
  source 1..9: note = Seed: LVVVGAGDV (KRAS G13D)
LVVVGNGDL

SEQ ID NO: 80126 - protein, 9 aa, synthetic construct
  source 1..9: note = Seed: LVVVGAGDV (KRAS G13D)
LVVVGNGDS

SEQ ID NO: 80127 - protein, 9 aa, synthetic construct
  source 1..9: note = Seed: LVVVGAGDV (KRAS G13D)
LVVVGNGDV

SEQ ID NO: 80128 - protein, 9 aa, synthetic construct
  source 1..9: note = Seed: LVVVGAGDV (KRAS G13D)
LVVVGPGDA

SEQ ID NO: 80129 - protein, 9 aa, synthetic construct
  source 1..9: note = Seed: LVVVGAGDV (KRAS G13D)
LVVVGPGDI

SEQ ID NO: 80130 - protein, 9 aa, synthetic construct
  source 1..9: note = Seed: LVVVGAGDV (KRAS G13D)
LVVVGPGDL

SEQ ID NO: 80131 - protein, 9 aa, synthetic construct
  source 1..9: note = Seed: LVVVGAGDV (KRAS G13D)
LVVVGPGDV

SEQ ID NO: 80132 - protein, 9 aa, synthetic construct
  source 1..9: note = Seed: LVVVGAGDV (KRAS G13D)
LVVVGRGDA

SEQ ID NO: 80133 - protein, 9 aa, synthetic construct
  source 1..9: note = Seed: LVVVGAGDV (KRAS G13D)
LVVVGRGDG

SEQ ID NO: 80134 - protein, 9 aa, synthetic construct
  source 1..9: note = Seed: LVVVGAGDV (KRAS G13D)
LVVVGRGDH

SEQ ID NO: 80135 - protein, 9 aa, synthetic construct
  source 1..9: note = Seed: LVVVGAGDV (KRAS G13D)
LVVVGRGDK

SEQ ID NO: 80136 - protein, 9 aa, synthetic construct
  source 1..9: note = Seed: LVVVGAGDV (KRAS G13D)
LVVVGRGDM

SEQ ID NO: 80137 - protein, 9 aa, synthetic construct
  source 1..9: note = Seed: LVVVGAGDV (KRAS G13D)
LVVVGRGDQ

SEQ ID NO: 80138 - protein, 9 aa, synthetic construct
  source 1..9: note = Seed: LVVVGAGDV (KRAS G13D)
LVVVGRGDR

SEQ ID NO: 80139 - protein, 9 aa, synthetic construct
  source 1..9: note = Seed: LVVVGAGDV (KRAS G13D)
LVVVGRGDS

SEQ ID NO: 80140 - protein, 9 aa, synthetic construct
  source 1..9: note = Seed: LVVVGAGDV (KRAS G13D)
LVVVGRGDT

SEQ ID NO: 80141 - protein, 9 aa, synthetic construct
  source 1..9: note = Seed: LVVVGAGDV (KRAS G13D)
LVVVGRGDV

SEQ ID NO: 80142 - protein, 9 aa, synthetic construct
  source 1..9: note = Seed: LVVVGAGDV (KRAS G13D)
LVVVGSGDA

SEQ ID NO: 80143 - protein, 9 aa, synthetic construct
  source 1..9: note = Seed: LVVVGAGDV (KRAS G13D)
LVVVGSGDI

SEQ ID NO: 80144 - protein, 9 aa, synthetic construct
  source 1..9: note = Seed: LVVVGAGDV (KRAS G13D)
LVVVGSGDL

SEQ ID NO: 80145 - protein, 9 aa, synthetic construct
  source 1..9: note = Seed: LVVVGAGDV (KRAS G13D)
LVVVGSGDM

SEQ ID NO: 80146 - protein, 9 aa, synthetic construct
  source 1..9: note = Seed: LVVVGAGDV (KRAS G13D)
LVVVGSGDV

SEQ ID NO: 80147 - protein, 9 aa, synthetic construct
  source 1..9: note = Seed: LVVVGAGDV (KRAS G13D)
LVVVGTGDA

SEQ ID NO: 80148 - protein, 9 aa, synthetic construct
  source 1..9: note = Seed: LVVVGAGDV (KRAS G13D)
LVVVGTGDL

SEQ ID NO: 80149 - protein, 9 aa, synthetic construct
  source 1..9: note = Seed: LVVVGAGDV (KRAS G13D)
LVVWGNGDA

SEQ ID NO: 80150 - protein, 9 aa, synthetic construct
  source 1..9: note = Seed: LVVVGAGDV (KRAS G13D)
LVVWGNGDI

SEQ ID NO: 80151 - protein, 9 aa, synthetic construct
  source 1..9: note = Seed: LVVVGAGDV (KRAS G13D)
LVVWGNGDL

SEQ ID NO: 80152 - protein, 9 aa, synthetic construct
  source 1..9: note = Seed: LVVVGAGDV (KRAS G13D)
LVVWGNGDM

SEQ ID NO: 80153 - protein, 9 aa, synthetic construct
  source 1..9: note = Seed: LVVVGAGDV (KRAS G13D)
LVVWGNGDV

SEQ ID NO: 80154 - protein, 9 aa, synthetic construct
  source 1..9: note = Seed: LVVVGAGDV (KRAS G13D)
LVVWGSGDA

SEQ ID NO: 80155 - protein, 9 aa, synthetic construct
  source 1..9: note = Seed: LVVVGAGDV (KRAS G13D)
LVVWGSGDI

SEQ ID NO: 80156 - protein, 9 aa, synthetic construct
  source 1..9: note = Seed: LVVVGAGDV (KRAS G13D)
LVVWGSGDL

SEQ ID NO: 80157 - protein, 9 aa, synthetic construct
  source 1..9: note = Seed: LVVVGAGDV (KRAS G13D)
LVVWGSGDV

SEQ ID NO: 80158 - protein, 9 aa, synthetic construct
  source 1..9: note = Seed: LVVVGAGDV (KRAS G13D)
LVVYGAGDA

SEQ ID NO: 80159 - protein, 9 aa, synthetic construct
  source 1..9: note = Seed: LVVVGAGDV (KRAS G13D)
LVVYGAGDI

SEQ ID NO: 80160 - protein, 9 aa, synthetic construct
  source 1..9: note = Seed: LVVVGAGDV (KRAS G13D)
LVVYGAGDL

SEQ ID NO: 80161 - protein, 9 aa, synthetic construct
  source 1..9: note = Seed: LVVVGAGDV (KRAS G13D)
LVVYGAGDM

SEQ ID NO: 80162 - protein, 9 aa, synthetic construct
  source 1..9: note = Seed: LVVVGAGDV (KRAS G13D)
LVVYGAGDV

SEQ ID NO: 80163 - protein, 9 aa, synthetic construct
  source 1..9: note = Seed: LVVVGAGDV (KRAS G13D)
LVVYGGGDA

SEQ ID NO: 80164 - protein, 9 aa, synthetic construct
  source 1..9: note = Seed: LVVVGAGDV (KRAS G13D)
LVVYGGGDI

SEQ ID NO: 80165 - protein, 9 aa, synthetic construct
  source 1..9: note = Seed: LVVVGAGDV (KRAS G13D)
LVVYGGGDL

SEQ ID NO: 80166 - protein, 9 aa, synthetic construct
  source 1..9: note = Seed: LVVVGAGDV (KRAS G13D)
LVVYGGGDM

SEQ ID NO: 80167 - protein, 9 aa, synthetic construct
  source 1..9: note = Seed: LVVVGAGDV (KRAS G13D)
LVVYGGGDV

SEQ ID NO: 80168 - protein, 9 aa, synthetic construct
  source 1..9: note = Seed: LVVVGAGDV (KRAS G13D)
LVVYGNGDA

SEQ ID NO: 80169 - protein, 9 aa, synthetic construct
  source 1..9: note = Seed: LVVVGAGDV (KRAS G13D)
LVVYGNGDF

SEQ ID NO: 80170 - protein, 9 aa, synthetic construct
  source 1..9: note = Seed: LVVVGAGDV (KRAS G13D)
LVVYGNGDI

SEQ ID NO: 80171 - protein, 9 aa, synthetic construct
  source 1..9: note = Seed: LVVVGAGDV (KRAS G13D)
LVVYGNGDL

SEQ ID NO: 80172 - protein, 9 aa, synthetic construct
  source 1..9: note = Seed: LVVVGAGDV (KRAS G13D)
LVVYGNGDM

SEQ ID NO: 80173 - protein, 9 aa, synthetic construct
  source 1..9: note = Seed: LVVVGAGDV (KRAS G13D)
LVVYGNGDS

SEQ ID NO: 80174 - protein, 9 aa, synthetic construct
  source 1..9: note = Seed: LVVVGAGDV (KRAS G13D)
LVVYGNGDT

SEQ ID NO: 80175 - protein, 9 aa, synthetic construct
  source 1..9: note = Seed: LVVVGAGDV (KRAS G13D)
LVVYGNGDV

SEQ ID NO: 80176 - protein, 9 aa, synthetic construct
  source 1..9: note = Seed: LVVVGAGDV (KRAS G13D)
LVVYGSGDA

SEQ ID NO: 80177 - protein, 9 aa, synthetic construct
  source 1..9: note = Seed: LVVVGAGDV (KRAS G13D)
LVVYGSGDF

SEQ ID NO: 80178 - protein, 9 aa, synthetic construct
  source 1..9: note = Seed: LVVVGAGDV (KRAS G13D)
LVVYGSGDI

SEQ ID NO: 80179 - protein, 9 aa, synthetic construct
  source 1..9: note = Seed: LVVVGAGDV (KRAS G13D)
LVVYGSGDL

SEQ ID NO: 80180 - protein, 9 aa, synthetic construct
  source 1..9: note = Seed: LVVVGAGDV (KRAS G13D)
LVVYGSGDM

SEQ ID NO: 80181 - protein, 9 aa, synthetic construct
  source 1..9: note = Seed: LVVVGAGDV (KRAS G13D)
LVVYGSGDS

SEQ ID NO: 80182 - protein, 9 aa, synthetic construct
  source 1..9: note = Seed: LVVVGAGDV (KRAS G13D)
LVVYGSGDT

SEQ ID NO: 80183 - protein, 9 aa, synthetic construct
  source 1..9: note = Seed: LVVVGAGDV (KRAS G13D)
LVVYGSGDV

SEQ ID NO: 80184 - protein, 9 aa, synthetic construct
  source 1..9: note = Seed: LVVVGAGDV (KRAS G13D)
LVVYGTGDA

SEQ ID NO: 80185 - protein, 9 aa, synthetic construct
  source 1..9: note = Seed: LVVVGAGDV (KRAS G13D)
LVVYGTGDI

SEQ ID NO: 80186 - protein, 9 aa, synthetic construct
  source 1..9: note = Seed: LVVVGAGDV (KRAS G13D)
LVVYGTGDL

SEQ ID NO: 80187 - protein, 9 aa, synthetic construct
  source 1..9: note = Seed: LVVVGAGDV (KRAS G13D)
LVVYGTGDM

SEQ ID NO: 80188 - protein, 9 aa, synthetic construct
  source 1..9: note = Seed: LVVVGAGDV (KRAS G13D)
LVVYGTGDV

SEQ ID NO: 80189 - protein, 9 aa, synthetic construct
  source 1..9: note = Seed: LVVVGAGDV (KRAS G13D)
LVVYGVGDL

SEQ ID NO: 80190 - protein, 9 aa, synthetic construct
  source 1..9: note = Seed: LVVVGAGDV (KRAS G13D)
MVVAGAGDA

SEQ ID NO: 80191 - protein, 9 aa, synthetic construct
  source 1..9: note = Seed: LVVVGAGDV (KRAS G13D)
MVVAGAGDI

SEQ ID NO: 80192 - protein, 9 aa, synthetic construct
  source 1..9: note = Seed: LVVVGAGDV (KRAS G13D)
MVVAGAGDL

SEQ ID NO: 80193 - protein, 9 aa, synthetic construct
  source 1..9: note = Seed: LVVVGAGDV (KRAS G13D)
MVVAGAGDM

SEQ ID NO: 80194 - protein, 9 aa, synthetic construct
  source 1..9: note = Seed: LVVVGAGDV (KRAS G13D)
MVVAGAGDV

SEQ ID NO: 80195 - protein, 9 aa, synthetic construct
  source 1..9: note = Seed: LVVVGAGDV (KRAS G13D)
MVVAGGGDA

SEQ ID NO: 80196 - protein, 9 aa, synthetic construct
  source 1..9: note = Seed: LVVVGAGDV (KRAS G13D)
MVVAGGGDI

SEQ ID NO: 80197 - protein, 9 aa, synthetic construct
  source 1..9: note = Seed: LVVVGAGDV (KRAS G13D)
MVVAGGGDL

SEQ ID NO: 80198 - protein, 9 aa, synthetic construct
  source 1..9: note = Seed: LVVVGAGDV (KRAS G13D)
MVVAGGGDM

SEQ ID NO: 80199 - protein, 9 aa, synthetic construct
  source 1..9: note = Seed: LVVVGAGDV (KRAS G13D)
MVVAGGGDV

SEQ ID NO: 80200 - protein, 9 aa, synthetic construct
  source 1..9: note = Seed: LVVVGAGDV (KRAS G13D)
MVVAGRGDA

SEQ ID NO: 80201 - protein, 9 aa, synthetic construct
  source 1..9: note = Seed: LVVVGAGDV (KRAS G13D)
MVVAGRGDS

SEQ ID NO: 80202 - protein, 9 aa, synthetic construct
  source 1..9: note = Seed: LVVVGAGDV (KRAS G13D)
MVVAGSGDA

SEQ ID NO: 80203 - protein, 9 aa, synthetic construct
  source 1..9: note = Seed: LVVVGAGDV (KRAS G13D)
MVVAGSGDI

SEQ ID NO: 80204 - protein, 9 aa, synthetic construct
  source 1..9: note = Seed: LVVVGAGDV (KRAS G13D)
MVVAGSGDL

SEQ ID NO: 80205 - protein, 9 aa, synthetic construct
  source 1..9: note = Seed: LVVVGAGDV (KRAS G13D)
MVVAGSGDV

SEQ ID NO: 80206 - protein, 9 aa, synthetic construct
  source 1..9: note = Seed: LVVVGAGDV (KRAS G13D)
MVVFGGGDL

SEQ ID NO: 80207 - protein, 9 aa, synthetic construct
  source 1..9: note = Seed: LVVVGAGDV (KRAS G13D)
MVVFGKGDA

SEQ ID NO: 80208 - protein, 9 aa, synthetic construct
  source 1..9: note = Seed: LVVVGAGDV (KRAS G13D)
MVVFGKGDS

SEQ ID NO: 80209 - protein, 9 aa, synthetic construct
  source 1..9: note = Seed: LVVVGAGDV (KRAS G13D)
MVVFGNGDA

SEQ ID NO: 80210 - protein, 9 aa, synthetic construct
  source 1..9: note = Seed: LVVVGAGDV (KRAS G13D)
MVVFGNGDI

SEQ ID NO: 80211 - protein, 9 aa, synthetic construct
  source 1..9: note = Seed: LVVVGAGDV (KRAS G13D)
MVVFGNGDL

SEQ ID NO: 80212 - protein, 9 aa, synthetic construct
  source 1..9: note = Seed: LVVVGAGDV (KRAS G13D)
MVVFGNGDM

SEQ ID NO: 80213 - protein, 9 aa, synthetic construct
  source 1..9: note = Seed: LVVVGAGDV (KRAS G13D)
MVVFGNGDV

SEQ ID NO: 80214 - protein, 9 aa, synthetic construct
  source 1..9: note = Seed: LVVVGAGDV (KRAS G13D)
MVVFGRGDA

SEQ ID NO: 80215 - protein, 9 aa, synthetic construct
  source 1..9: note = Seed: LVVVGAGDV (KRAS G13D)
MVVFGRGDH

SEQ ID NO: 80216 - protein, 9 aa, synthetic construct
  source 1..9: note = Seed: LVVVGAGDV (KRAS G13D)
MVVFGRGDS

SEQ ID NO: 80217 - protein, 9 aa, synthetic construct
  source 1..9: note = Seed: LVVVGAGDV (KRAS G13D)
MVVFGSGDA

SEQ ID NO: 80218 - protein, 9 aa, synthetic construct
  source 1..9: note = Seed: LVVVGAGDV (KRAS G13D)
MVVFGSGDI

SEQ ID NO: 80219 - protein, 9 aa, synthetic construct
  source 1..9: note = Seed: LVVVGAGDV (KRAS G13D)
MVVFGSGDL

SEQ ID NO: 80220 - protein, 9 aa, synthetic construct
  source 1..9: note = Seed: LVVVGAGDV (KRAS G13D)
MVVFGSGDM

SEQ ID NO: 80221 - protein, 9 aa, synthetic construct
  source 1..9: note = Seed: LVVVGAGDV (KRAS G13D)
MVVFGSGDV

SEQ ID NO: 80222 - protein, 9 aa, synthetic construct
  source 1..9: note = Seed: LVVVGAGDV (KRAS G13D)
MVVFGTGDL

SEQ ID NO: 80223 - protein, 9 aa, synthetic construct
  source 1..9: note = Seed: LVVVGAGDV (KRAS G13D)
MVVIGAGDA

SEQ ID NO: 80224 - protein, 9 aa, synthetic construct
  source 1..9: note = Seed: LVVVGAGDV (KRAS G13D)
MVVIGAGDI

SEQ ID NO: 80225 - protein, 9 aa, synthetic construct
  source 1..9: note = Seed: LVVVGAGDV (KRAS G13D)
MVVIGAGDL

SEQ ID NO: 80226 - protein, 9 aa, synthetic construct
  source 1..9: note = Seed: LVVVGAGDV (KRAS G13D)
MVVIGAGDM

SEQ ID NO: 80227 - protein, 9 aa, synthetic construct
  source 1..9: note = Seed: LVVVGAGDV (KRAS G13D)
MVVIGAGDV

SEQ ID NO: 80228 - protein, 9 aa, synthetic construct
  source 1..9: note = Seed: LVVVGAGDV (KRAS G13D)
MVVIGGGDA

SEQ ID NO: 80229 - protein, 9 aa, synthetic construct
  source 1..9: note = Seed: LVVVGAGDV (KRAS G13D)
MVVIGGGDI

SEQ ID NO: 80230 - protein, 9 aa, synthetic construct
  source 1..9: note = Seed: LVVVGAGDV (KRAS G13D)
MVVIGGGDL

SEQ ID NO: 80231 - protein, 9 aa, synthetic construct
  source 1..9: note = Seed: LVVVGAGDV (KRAS G13D)
MVVIGGGDV

SEQ ID NO: 80232 - protein, 9 aa, synthetic construct
  source 1..9: note = Seed: LVVVGAGDV (KRAS G13D)
MVVIGKGDA

SEQ ID NO: 80233 - protein, 9 aa, synthetic construct
  source 1..9: note = Seed: LVVVGAGDV (KRAS G13D)
MVVIGKGDH

SEQ ID NO: 80234 - protein, 9 aa, synthetic construct
  source 1..9: note = Seed: LVVVGAGDV (KRAS G13D)
MVVIGKGDQ

SEQ ID NO: 80235 - protein, 9 aa, synthetic construct
  source 1..9: note = Seed: LVVVGAGDV (KRAS G13D)
MVVIGKGDS

SEQ ID NO: 80236 - protein, 9 aa, synthetic construct
  source 1..9: note = Seed: LVVVGAGDV (KRAS G13D)
MVVIGKGDT

SEQ ID NO: 80237 - protein, 9 aa, synthetic construct
  source 1..9: note = Seed: LVVVGAGDV (KRAS G13D)
MVVIGNGDA

SEQ ID NO: 80238 - protein, 9 aa, synthetic construct
  source 1..9: note = Seed: LVVVGAGDV (KRAS G13D)
MVVIGNGDL

SEQ ID NO: 80239 - protein, 9 aa, synthetic construct
  source 1..9: note = Seed: LVVVGAGDV (KRAS G13D)
MVVIGPGDA

SEQ ID NO: 80240 - protein, 9 aa, synthetic construct
  source 1..9: note = Seed: LVVVGAGDV (KRAS G13D)
MVVIGPGDI

SEQ ID NO: 80241 - protein, 9 aa, synthetic construct
  source 1..9: note = Seed: LVVVGAGDV (KRAS G13D)
MVVIGPGDL

SEQ ID NO: 80242 - protein, 9 aa, synthetic construct
  source 1..9: note = Seed: LVVVGAGDV (KRAS G13D)
MVVIGPGDV

SEQ ID NO: 80243 - protein, 9 aa, synthetic construct
  source 1..9: note = Seed: LVVVGAGDV (KRAS G13D)
MVVIGRGDA

SEQ ID NO: 80244 - protein, 9 aa, synthetic construct
  source 1..9: note = Seed: LVVVGAGDV (KRAS G13D)
MVVIGRGDG

SEQ ID NO: 80245 - protein, 9 aa, synthetic construct
  source 1..9: note = Seed: LVVVGAGDV (KRAS G13D)
MVVIGRGDH

SEQ ID NO: 80246 - protein, 9 aa, synthetic construct
  source 1..9: note = Seed: LVVVGAGDV (KRAS G13D)
MVVIGRGDK

SEQ ID NO: 80247 - protein, 9 aa, synthetic construct
  source 1..9: note = Seed: LVVVGAGDV (KRAS G13D)
MVVIGRGDL

SEQ ID NO: 80248 - protein, 9 aa, synthetic construct
  source 1..9: note = Seed: LVVVGAGDV (KRAS G13D)
MVVIGRGDM

SEQ ID NO: 80249 - protein, 9 aa, synthetic construct
  source 1..9: note = Seed: LVVVGAGDV (KRAS G13D)
MVVIGRGDQ

SEQ ID NO: 80250 - protein, 9 aa, synthetic construct
  source 1..9: note = Seed: LVVVGAGDV (KRAS G13D)
MVVIGRGDR

SEQ ID NO: 80251 - protein, 9 aa, synthetic construct
  source 1..9: note = Seed: LVVVGAGDV (KRAS G13D)
MVVIGRGDS

SEQ ID NO: 80252 - protein, 9 aa, synthetic construct
  source 1..9: note = Seed: LVVVGAGDV (KRAS G13D)
MVVIGRGDT

SEQ ID NO: 80253 - protein, 9 aa, synthetic construct
  source 1..9: note = Seed: LVVVGAGDV (KRAS G13D)
MVVIGRGDV

SEQ ID NO: 80254 - protein, 9 aa, synthetic construct
  source 1..9: note = Seed: LVVVGAGDV (KRAS G13D)
MVVIGSGDA

SEQ ID NO: 80255 - protein, 9 aa, synthetic construct
  source 1..9: note = Seed: LVVVGAGDV (KRAS G13D)
MVVIGSGDI

SEQ ID NO: 80256 - protein, 9 aa, synthetic construct
  source 1..9: note = Seed: LVVVGAGDV (KRAS G13D)
MVVIGSGDL

SEQ ID NO: 80257 - protein, 9 aa, synthetic construct
  source 1..9: note = Seed: LVVVGAGDV (KRAS G13D)
MVVIGSGDV

SEQ ID NO: 80258 - protein, 9 aa, synthetic construct
  source 1..9: note = Seed: LVVVGAGDV (KRAS G13D)
MVVIGTGDL

SEQ ID NO: 80259 - protein, 9 aa, synthetic construct
  source 1..9: note = Seed: LVVVGAGDV (KRAS G13D)
MVVKGRGDA

SEQ ID NO: 80260 - protein, 9 aa, synthetic construct
  source 1..9: note = Seed: LVVVGAGDV (KRAS G13D)
MVVLGAGDA

SEQ ID NO: 80261 - protein, 9 aa, synthetic construct
  source 1..9: note = Seed: LVVVGAGDV (KRAS G13D)
MVVLGAGDI

SEQ ID NO: 80262 - protein, 9 aa, synthetic construct
  source 1..9: note = Seed: LVVVGAGDV (KRAS G13D)
MVVLGAGDL

SEQ ID NO: 80263 - protein, 9 aa, synthetic construct
  source 1..9: note = Seed: LVVVGAGDV (KRAS G13D)
MVVLGAGDM

SEQ ID NO: 80264 - protein, 9 aa, synthetic construct
  source 1..9: note = Seed: LVVVGAGDV (KRAS G13D)
MVVLGAGDS

SEQ ID NO: 80265 - protein, 9 aa, synthetic construct
  source 1..9: note = Seed: LVVVGAGDV (KRAS G13D)
MVVLGAGDT

SEQ ID NO: 80266 - protein, 9 aa, synthetic construct
  source 1..9: note = Seed: LVVVGAGDV (KRAS G13D)
MVVLGAGDV

SEQ ID NO: 80267 - protein, 9 aa, synthetic construct
  source 1..9: note = Seed: LVVVGAGDV (KRAS G13D)
MVVLGGGDA

SEQ ID NO: 80268 - protein, 9 aa, synthetic construct
  source 1..9: note = Seed: LVVVGAGDV (KRAS G13D)
MVVLGGGDI

SEQ ID NO: 80269 - protein, 9 aa, synthetic construct
  source 1..9: note = Seed: LVVVGAGDV (KRAS G13D)
MVVLGGGDL

SEQ ID NO: 80270 - protein, 9 aa, synthetic construct
  source 1..9: note = Seed: LVVVGAGDV (KRAS G13D)
MVVLGGGDM

SEQ ID NO: 80271 - protein, 9 aa, synthetic construct
  source 1..9: note = Seed: LVVVGAGDV (KRAS G13D)
MVVLGGGDS

SEQ ID NO: 80272 - protein, 9 aa, synthetic construct
  source 1..9: note = Seed: LVVVGAGDV (KRAS G13D)
MVVLGGGDT

SEQ ID NO: 80273 - protein, 9 aa, synthetic construct
  source 1..9: note = Seed: LVVVGAGDV (KRAS G13D)
MVVLGGGDV

SEQ ID NO: 80274 - protein, 9 aa, synthetic construct
  source 1..9: note = Seed: LVVVGAGDV (KRAS G13D)
MVVLGKGDA

SEQ ID NO: 80275 - protein, 9 aa, synthetic construct
  source 1..9: note = Seed: LVVVGAGDV (KRAS G13D)
MVVLGKGDG

SEQ ID NO: 80276 - protein, 9 aa, synthetic construct
  source 1..9: note = Seed: LVVVGAGDV (KRAS G13D)
MVVLGKGDH

SEQ ID NO: 80277 - protein, 9 aa, synthetic construct
  source 1..9: note = Seed: LVVVGAGDV (KRAS G13D)
MVVLGKGDQ

SEQ ID NO: 80278 - protein, 9 aa, synthetic construct
  source 1..9: note = Seed: LVVVGAGDV (KRAS G13D)
MVVLGKGDS

SEQ ID NO: 80279 - protein, 9 aa, synthetic construct
  source 1..9: note = Seed: LVVVGAGDV (KRAS G13D)
MVVLGKGDT

SEQ ID NO: 80280 - protein, 9 aa, synthetic construct
  source 1..9: note = Seed: LVVVGAGDV (KRAS G13D)
MVVLGNGDA

SEQ ID NO: 80281 - protein, 9 aa, synthetic construct
  source 1..9: note = Seed: LVVVGAGDV (KRAS G13D)
MVVLGNGDI

SEQ ID NO: 80282 - protein, 9 aa, synthetic construct
  source 1..9: note = Seed: LVVVGAGDV (KRAS G13D)
MVVLGNGDL

SEQ ID NO: 80283 - protein, 9 aa, synthetic construct
  source 1..9: note = Seed: LVVVGAGDV (KRAS G13D)
MVVLGNGDM

SEQ ID NO: 80284 - protein, 9 aa, synthetic construct
  source 1..9: note = Seed: LVVVGAGDV (KRAS G13D)
MVVLGNGDT

SEQ ID NO: 80285 - protein, 9 aa, synthetic construct
  source 1..9: note = Seed: LVVVGAGDV (KRAS G13D)
MVVLGNGDV

SEQ ID NO: 80286 - protein, 9 aa, synthetic construct
  source 1..9: note = Seed: LVVVGAGDV (KRAS G13D)
MVVLGPGDA

SEQ ID NO: 80287 - protein, 9 aa, synthetic construct
  source 1..9: note = Seed: LVVVGAGDV (KRAS G13D)
MVVLGPGDI

SEQ ID NO: 80288 - protein, 9 aa, synthetic construct
  source 1..9: note = Seed: LVVVGAGDV (KRAS G13D)
MVVLGPGDL

SEQ ID NO: 80289 - protein, 9 aa, synthetic construct
  source 1..9: note = Seed: LVVVGAGDV (KRAS G13D)
MVVLGPGDM

SEQ ID NO: 80290 - protein, 9 aa, synthetic construct
  source 1..9: note = Seed: LVVVGAGDV (KRAS G13D)
MVVLGPGDV

SEQ ID NO: 80291 - protein, 9 aa, synthetic construct
  source 1..9: note = Seed: LVVVGAGDV (KRAS G13D)
MVVLGRGDA

SEQ ID NO: 80292 - protein, 9 aa, synthetic construct
  source 1..9: note = Seed: LVVVGAGDV (KRAS G13D)
MVVLGRGDG

SEQ ID NO: 80293 - protein, 9 aa, synthetic construct
  source 1..9: note = Seed: LVVVGAGDV (KRAS G13D)
MVVLGRGDH

SEQ ID NO: 80294 - protein, 9 aa, synthetic construct
  source 1..9: note = Seed: LVVVGAGDV (KRAS G13D)
MVVLGRGDI

SEQ ID NO: 80295 - protein, 9 aa, synthetic construct
  source 1..9: note = Seed: LVVVGAGDV (KRAS G13D)
MVVLGRGDK

SEQ ID NO: 80296 - protein, 9 aa, synthetic construct
  source 1..9: note = Seed: LVVVGAGDV (KRAS G13D)
MVVLGRGDL

SEQ ID NO: 80297 - protein, 9 aa, synthetic construct
  source 1..9: note = Seed: LVVVGAGDV (KRAS G13D)
MVVLGRGDM

SEQ ID NO: 80298 - protein, 9 aa, synthetic construct
  source 1..9: note = Seed: LVVVGAGDV (KRAS G13D)
MVVLGRGDN

SEQ ID NO: 80299 - protein, 9 aa, synthetic construct
  source 1..9: note = Seed: LVVVGAGDV (KRAS G13D)
MVVLGRGDQ

SEQ ID NO: 80300 - protein, 9 aa, synthetic construct
  source 1..9: note = Seed: LVVVGAGDV (KRAS G13D)
MVVLGRGDR

SEQ ID NO: 80301 - protein, 9 aa, synthetic construct
  source 1..9: note = Seed: LVVVGAGDV (KRAS G13D)
MVVLGRGDS

SEQ ID NO: 80302 - protein, 9 aa, synthetic construct
  source 1..9: note = Seed: LVVVGAGDV (KRAS G13D)
MVVLGRGDT

SEQ ID NO: 80303 - protein, 9 aa, synthetic construct
  source 1..9: note = Seed: LVVVGAGDV (KRAS G13D)
MVVLGRGDV

SEQ ID NO: 80304 - protein, 9 aa, synthetic construct
  source 1..9: note = Seed: LVVVGAGDV (KRAS G13D)
MVVLGSGDA

SEQ ID NO: 80305 - protein, 9 aa, synthetic construct
  source 1..9: note = Seed: LVVVGAGDV (KRAS G13D)
MVVLGSGDI

SEQ ID NO: 80306 - protein, 9 aa, synthetic construct
  source 1..9: note = Seed: LVVVGAGDV (KRAS G13D)
MVVLGSGDL

SEQ ID NO: 80307 - protein, 9 aa, synthetic construct
  source 1..9: note = Seed: LVVVGAGDV (KRAS G13D)
MVVLGSGDM

SEQ ID NO: 80308 - protein, 9 aa, synthetic construct
  source 1..9: note = Seed: LVVVGAGDV (KRAS G13D)
MVVLGSGDS

SEQ ID NO: 80309 - protein, 9 aa, synthetic construct
  source 1..9: note = Seed: LVVVGAGDV (KRAS G13D)
MVVLGSGDT

SEQ ID NO: 80310 - protein, 9 aa, synthetic construct
  source 1..9: note = Seed: LVVVGAGDV (KRAS G13D)
MVVLGSGDV

SEQ ID NO: 80311 - protein, 9 aa, synthetic construct
  source 1..9: note = Seed: LVVVGAGDV (KRAS G13D)
MVVLGTGDA

SEQ ID NO: 80312 - protein, 9 aa, synthetic construct
  source 1..9: note = Seed: LVVVGAGDV (KRAS G13D)
MVVLGTGDI

SEQ ID NO: 80313 - protein, 9 aa, synthetic construct
  source 1..9: note = Seed: LVVVGAGDV (KRAS G13D)
MVVLGTGDL

SEQ ID NO: 80314 - protein, 9 aa, synthetic construct
  source 1..9: note = Seed: LVVVGAGDV (KRAS G13D)
MVVLGTGDM

SEQ ID NO: 80315 - protein, 9 aa, synthetic construct
  source 1..9: note = Seed: LVVVGAGDV (KRAS G13D)
MVVLGTGDV

SEQ ID NO: 80316 - protein, 9 aa, synthetic construct
  source 1..9: note = Seed: LVVVGAGDV (KRAS G13D)
MVVLGVGDA

SEQ ID NO: 80317 - protein, 9 aa, synthetic construct
  source 1..9: note = Seed: LVVVGAGDV (KRAS G13D)
MVVLGVGDL

SEQ ID NO: 80318 - protein, 9 aa, synthetic construct
  source 1..9: note = Seed: LVVVGAGDV (KRAS G13D)
MVVLGVGDV

SEQ ID NO: 80319 - protein, 9 aa, synthetic construct
  source 1..9: note = Seed: LVVVGAGDV (KRAS G13D)
MVVMGAGDA

SEQ ID NO: 80320 - protein, 9 aa, synthetic construct
  source 1..9: note = Seed: LVVVGAGDV (KRAS G13D)
MVVMGAGDI

SEQ ID NO: 80321 - protein, 9 aa, synthetic construct
  source 1..9: note = Seed: LVVVGAGDV (KRAS G13D)
MVVMGAGDL

SEQ ID NO: 80322 - protein, 9 aa, synthetic construct
  source 1..9: note = Seed: LVVVGAGDV (KRAS G13D)
MVVMGAGDM

SEQ ID NO: 80323 - protein, 9 aa, synthetic construct
  source 1..9: note = Seed: LVVVGAGDV (KRAS G13D)
MVVMGAGDS

SEQ ID NO: 80324 - protein, 9 aa, synthetic construct
  source 1..9: note = Seed: LVVVGAGDV (KRAS G13D)
MVVMGAGDT

SEQ ID NO: 80325 - protein, 9 aa, synthetic construct
  source 1..9: note = Seed: LVVVGAGDV (KRAS G13D)
MVVMGAGDV

SEQ ID NO: 80326 - protein, 9 aa, synthetic construct
  source 1..9: note = Seed: LVVVGAGDV (KRAS G13D)
MVVMGGGDA

SEQ ID NO: 80327 - protein, 9 aa, synthetic construct
  source 1..9: note = Seed: LVVVGAGDV (KRAS G13D)
MVVMGGGDI

SEQ ID NO: 80328 - protein, 9 aa, synthetic construct
  source 1..9: note = Seed: LVVVGAGDV (KRAS G13D)
MVVMGGGDL

SEQ ID NO: 80329 - protein, 9 aa, synthetic construct
  source 1..9: note = Seed: LVVVGAGDV (KRAS G13D)
MVVMGGGDM

SEQ ID NO: 80330 - protein, 9 aa, synthetic construct
  source 1..9: note = Seed: LVVVGAGDV (KRAS G13D)
MVVMGGGDS

SEQ ID NO: 80331 - protein, 9 aa, synthetic construct
  source 1..9: note = Seed: LVVVGAGDV (KRAS G13D)
MVVMGGGDT

SEQ ID NO: 80332 - protein, 9 aa, synthetic construct
  source 1..9: note = Seed: LVVVGAGDV (KRAS G13D)
MVVMGGGDV

SEQ ID NO: 80333 - protein, 9 aa, synthetic construct
  source 1..9: note = Seed: LVVVGAGDV (KRAS G13D)
MVVMGIGDA

SEQ ID NO: 80334 - protein, 9 aa, synthetic construct
  source 1..9: note = Seed: LVVVGAGDV (KRAS G13D)
MVVMGIGDM

SEQ ID NO: 80335 - protein, 9 aa, synthetic construct
  source 1..9: note = Seed: LVVVGAGDV (KRAS G13D)
MVVMGKGDA

SEQ ID NO: 80336 - protein, 9 aa, synthetic construct
  source 1..9: note = Seed: LVVVGAGDV (KRAS G13D)
MVVMGKGDH

SEQ ID NO: 80337 - protein, 9 aa, synthetic construct
  source 1..9: note = Seed: LVVVGAGDV (KRAS G13D)
MVVMGKGDK

SEQ ID NO: 80338 - protein, 9 aa, synthetic construct
  source 1..9: note = Seed: LVVVGAGDV (KRAS G13D)
MVVMGKGDL

SEQ ID NO: 80339 - protein, 9 aa, synthetic construct
  source 1..9: note = Seed: LVVVGAGDV (KRAS G13D)
MVVMGKGDM

SEQ ID NO: 80340 - protein, 9 aa, synthetic construct
  source 1..9: note = Seed: LVVVGAGDV (KRAS G13D)
MVVMGKGDQ

SEQ ID NO: 80341 - protein, 9 aa, synthetic construct
  source 1..9: note = Seed: LVVVGAGDV (KRAS G13D)
MVVMGKGDS

SEQ ID NO: 80342 - protein, 9 aa, synthetic construct
  source 1..9: note = Seed: LVVVGAGDV (KRAS G13D)
MVVMGKGDT

SEQ ID NO: 80343 - protein, 9 aa, synthetic construct
  source 1..9: note = Seed: LVVVGAGDV (KRAS G13D)
MVVMGKGDV

SEQ ID NO: 80344 - protein, 9 aa, synthetic construct
  source 1..9: note = Seed: LVVVGAGDV (KRAS G13D)
MVVMGLGDM

SEQ ID NO: 80345 - protein, 9 aa, synthetic construct
  source 1..9: note = Seed: LVVVGAGDV (KRAS G13D)
MVVMGMGDM

SEQ ID NO: 80346 - protein, 9 aa, synthetic construct
  source 1..9: note = Seed: LVVVGAGDV (KRAS G13D)
MVVMGNGDA

SEQ ID NO: 80347 - protein, 9 aa, synthetic construct
  source 1..9: note = Seed: LVVVGAGDV (KRAS G13D)
MVVMGNGDI

SEQ ID NO: 80348 - protein, 9 aa, synthetic construct
  source 1..9: note = Seed: LVVVGAGDV (KRAS G13D)
MVVMGNGDL

SEQ ID NO: 80349 - protein, 9 aa, synthetic construct
  source 1..9: note = Seed: LVVVGAGDV (KRAS G13D)
MVVMGNGDM

SEQ ID NO: 80350 - protein, 9 aa, synthetic construct
  source 1..9: note = Seed: LVVVGAGDV (KRAS G13D)
MVVMGNGDS

SEQ ID NO: 80351 - protein, 9 aa, synthetic construct
  source 1..9: note = Seed: LVVVGAGDV (KRAS G13D)
MVVMGNGDV

SEQ ID NO: 80352 - protein, 9 aa, synthetic construct
  source 1..9: note = Seed: LVVVGAGDV (KRAS G13D)
MVVMGPGDA

SEQ ID NO: 80353 - protein, 9 aa, synthetic construct
  source 1..9: note = Seed: LVVVGAGDV (KRAS G13D)
MVVMGPGDI

SEQ ID NO: 80354 - protein, 9 aa, synthetic construct
  source 1..9: note = Seed: LVVVGAGDV (KRAS G13D)
MVVMGPGDL

SEQ ID NO: 80355 - protein, 9 aa, synthetic construct
  source 1..9: note = Seed: LVVVGAGDV (KRAS G13D)
MVVMGPGDM

SEQ ID NO: 80356 - protein, 9 aa, synthetic construct
  source 1..9: note = Seed: LVVVGAGDV (KRAS G13D)
MVVMGPGDV

SEQ ID NO: 80357 - protein, 9 aa, synthetic construct
  source 1..9: note = Seed: LVVVGAGDV (KRAS G13D)
MVVMGRGDA

SEQ ID NO: 80358 - protein, 9 aa, synthetic construct
  source 1..9: note = Seed: LVVVGAGDV (KRAS G13D)
MVVMGRGDG

SEQ ID NO: 80359 - protein, 9 aa, synthetic construct
  source 1..9: note = Seed: LVVVGAGDV (KRAS G13D)
MVVMGRGDH

SEQ ID NO: 80360 - protein, 9 aa, synthetic construct
  source 1..9: note = Seed: LVVVGAGDV (KRAS G13D)
MVVMGRGDI

SEQ ID NO: 80361 - protein, 9 aa, synthetic construct
  source 1..9: note = Seed: LVVVGAGDV (KRAS G13D)
MVVMGRGDK

SEQ ID NO: 80362 - protein, 9 aa, synthetic construct
  source 1..9: note = Seed: LVVVGAGDV (KRAS G13D)
MVVMGRGDL

SEQ ID NO: 80363 - protein, 9 aa, synthetic construct
  source 1..9: note = Seed: LVVVGAGDV (KRAS G13D)
MVVMGRGDM

SEQ ID NO: 80364 - protein, 9 aa, synthetic construct
  source 1..9: note = Seed: LVVVGAGDV (KRAS G13D)
MVVMGRGDN

SEQ ID NO: 80365 - protein, 9 aa, synthetic construct
  source 1..9: note = Seed: LVVVGAGDV (KRAS G13D)
MVVMGRGDQ

SEQ ID NO: 80366 - protein, 9 aa, synthetic construct
  source 1..9: note = Seed: LVVVGAGDV (KRAS G13D)
MVVMGRGDR

SEQ ID NO: 80367 - protein, 9 aa, synthetic construct
  source 1..9: note = Seed: LVVVGAGDV (KRAS G13D)
MVVMGRGDS

SEQ ID NO: 80368 - protein, 9 aa, synthetic construct
  source 1..9: note = Seed: LVVVGAGDV (KRAS G13D)
MVVMGRGDT

SEQ ID NO: 80369 - protein, 9 aa, synthetic construct
  source 1..9: note = Seed: LVVVGAGDV (KRAS G13D)
MVVMGRGDV

SEQ ID NO: 80370 - protein, 9 aa, synthetic construct
  source 1..9: note = Seed: LVVVGAGDV (KRAS G13D)
MVVMGRGDY

SEQ ID NO: 80371 - protein, 9 aa, synthetic construct
  source 1..9: note = Seed: LVVVGAGDV (KRAS G13D)
MVVMGSGDA

SEQ ID NO: 80372 - protein, 9 aa, synthetic construct
  source 1..9: note = Seed: LVVVGAGDV (KRAS G13D)
MVVMGSGDI

SEQ ID NO: 80373 - protein, 9 aa, synthetic construct
  source 1..9: note = Seed: LVVVGAGDV (KRAS G13D)
MVVMGSGDL

SEQ ID NO: 80374 - protein, 9 aa, synthetic construct
  source 1..9: note = Seed: LVVVGAGDV (KRAS G13D)
MVVMGSGDM

SEQ ID NO: 80375 - protein, 9 aa, synthetic construct
  source 1..9: note = Seed: LVVVGAGDV (KRAS G13D)
MVVMGSGDS

SEQ ID NO: 80376 - protein, 9 aa, synthetic construct
  source 1..9: note = Seed: LVVVGAGDV (KRAS G13D)
MVVMGSGDT

SEQ ID NO: 80377 - protein, 9 aa, synthetic construct
  source 1..9: note = Seed: LVVVGAGDV (KRAS G13D)
MVVMGSGDV

SEQ ID NO: 80378 - protein, 9 aa, synthetic construct
  source 1..9: note = Seed: LVVVGAGDV (KRAS G13D)
MVVMGTGDA

SEQ ID NO: 80379 - protein, 9 aa, synthetic construct
  source 1..9: note = Seed: LVVVGAGDV (KRAS G13D)
MVVMGTGDI

SEQ ID NO: 80380 - protein, 9 aa, synthetic construct
  source 1..9: note = Seed: LVVVGAGDV (KRAS G13D)
MVVMGTGDL

SEQ ID NO: 80381 - protein, 9 aa, synthetic construct
  source 1..9: note = Seed: LVVVGAGDV (KRAS G13D)
MVVMGTGDM

SEQ ID NO: 80382 - protein, 9 aa, synthetic construct
  source 1..9: note = Seed: LVVVGAGDV (KRAS G13D)
MVVMGTGDV

SEQ ID NO: 80383 - protein, 9 aa, synthetic construct
  source 1..9: note = Seed: LVVVGAGDV (KRAS G13D)
MVVMGVGDA

SEQ ID NO: 80384 - protein, 9 aa, synthetic construct
  source 1..9: note = Seed: LVVVGAGDV (KRAS G13D)
MVVMGVGDI

SEQ ID NO: 80385 - protein, 9 aa, synthetic construct
  source 1..9: note = Seed: LVVVGAGDV (KRAS G13D)
MVVMGVGDL

SEQ ID NO: 80386 - protein, 9 aa, synthetic construct
  source 1..9: note = Seed: LVVVGAGDV (KRAS G13D)
MVVMGVGDM

SEQ ID NO: 80387 - protein, 9 aa, synthetic construct
  source 1..9: note = Seed: LVVVGAGDV (KRAS G13D)
MVVMGVGDV

SEQ ID NO: 80388 - protein, 9 aa, synthetic construct
  source 1..9: note = Seed: LVVVGAGDV (KRAS G13D)
MVVNGAGDF

SEQ ID NO: 80389 - protein, 9 aa, synthetic construct
  source 1..9: note = Seed: LVVVGAGDV (KRAS G13D)
MVVNGAGDI

SEQ ID NO: 80390 - protein, 9 aa, synthetic construct
  source 1..9: note = Seed: LVVVGAGDV (KRAS G13D)
MVVNGAGDL

SEQ ID NO: 80391 - protein, 9 aa, synthetic construct
  source 1..9: note = Seed: LVVVGAGDV (KRAS G13D)
MVVNGAGDM

SEQ ID NO: 80392 - protein, 9 aa, synthetic construct
  source 1..9: note = Seed: LVVVGAGDV (KRAS G13D)
MVVNGAGDV

SEQ ID NO: 80393 - protein, 9 aa, synthetic construct
  source 1..9: note = Seed: LVVVGAGDV (KRAS G13D)
MVVNGAGDY

SEQ ID NO: 80394 - protein, 9 aa, synthetic construct
  source 1..9: note = Seed: LVVVGAGDV (KRAS G13D)
MVVNGGGDI

SEQ ID NO: 80395 - protein, 9 aa, synthetic construct
  source 1..9: note = Seed: LVVVGAGDV (KRAS G13D)
MVVNGGGDL

SEQ ID NO: 80396 - protein, 9 aa, synthetic construct
  source 1..9: note = Seed: LVVVGAGDV (KRAS G13D)
MVVNGGGDV

SEQ ID NO: 80397 - protein, 9 aa, synthetic construct
  source 1..9: note = Seed: LVVVGAGDV (KRAS G13D)
MVVNGIGDF

SEQ ID NO: 80398 - protein, 9 aa, synthetic construct
  source 1..9: note = Seed: LVVVGAGDV (KRAS G13D)
MVVNGIGDI

SEQ ID NO: 80399 - protein, 9 aa, synthetic construct
  source 1..9: note = Seed: LVVVGAGDV (KRAS G13D)
MVVNGIGDL

SEQ ID NO: 80400 - protein, 9 aa, synthetic construct
  source 1..9: note = Seed: LVVVGAGDV (KRAS G13D)
MVVNGIGDM

SEQ ID NO: 80401 - protein, 9 aa, synthetic construct
  source 1..9: note = Seed: LVVVGAGDV (KRAS G13D)
MVVNGIGDV

SEQ ID NO: 80402 - protein, 9 aa, synthetic construct
  source 1..9: note = Seed: LVVVGAGDV (KRAS G13D)
MVVNGIGDY

SEQ ID NO: 80403 - protein, 9 aa, synthetic construct
  source 1..9: note = Seed: LVVVGAGDV (KRAS G13D)
MVVNGLGDI

SEQ ID NO: 80404 - protein, 9 aa, synthetic construct
  source 1..9: note = Seed: LVVVGAGDV (KRAS G13D)
MVVNGLGDL

SEQ ID NO: 80405 - protein, 9 aa, synthetic construct
  source 1..9: note = Seed: LVVVGAGDV (KRAS G13D)
MVVNGLGDV

SEQ ID NO: 80406 - protein, 9 aa, synthetic construct
  source 1..9: note = Seed: LVVVGAGDV (KRAS G13D)
MVVNGMGDI

SEQ ID NO: 80407 - protein, 9 aa, synthetic construct
  source 1..9: note = Seed: LVVVGAGDV (KRAS G13D)
MVVNGMGDV

SEQ ID NO: 80408 - protein, 9 aa, synthetic construct
  source 1..9: note = Seed: LVVVGAGDV (KRAS G13D)
MVVNGNGDF

SEQ ID NO: 80409 - protein, 9 aa, synthetic construct
  source 1..9: note = Seed: LVVVGAGDV (KRAS G13D)
MVVNGNGDI

SEQ ID NO: 80410 - protein, 9 aa, synthetic construct
  source 1..9: note = Seed: LVVVGAGDV (KRAS G13D)
MVVNGNGDL

SEQ ID NO: 80411 - protein, 9 aa, synthetic construct
  source 1..9: note = Seed: LVVVGAGDV (KRAS G13D)
MVVNGNGDM

SEQ ID NO: 80412 - protein, 9 aa, synthetic construct
  source 1..9: note = Seed: LVVVGAGDV (KRAS G13D)
MVVNGNGDV

SEQ ID NO: 80413 - protein, 9 aa, synthetic construct
  source 1..9: note = Seed: LVVVGAGDV (KRAS G13D)
MVVNGNGDY

SEQ ID NO: 80414 - protein, 9 aa, synthetic construct
  source 1..9: note = Seed: LVVVGAGDV (KRAS G13D)
MVVNGPGDI

SEQ ID NO: 80415 - protein, 9 aa, synthetic construct
  source 1..9: note = Seed: LVVVGAGDV (KRAS G13D)
MVVNGPGDL

SEQ ID NO: 80416 - protein, 9 aa, synthetic construct
  source 1..9: note = Seed: LVVVGAGDV (KRAS G13D)
MVVNGPGDV

SEQ ID NO: 80417 - protein, 9 aa, synthetic construct
  source 1..9: note = Seed: LVVVGAGDV (KRAS G13D)
MVVNGSGDF

SEQ ID NO: 80418 - protein, 9 aa, synthetic construct
  source 1..9: note = Seed: LVVVGAGDV (KRAS G13D)
MVVNGSGDI

SEQ ID NO: 80419 - protein, 9 aa, synthetic construct
  source 1..9: note = Seed: LVVVGAGDV (KRAS G13D)
MVVNGSGDL

SEQ ID NO: 80420 - protein, 9 aa, synthetic construct
  source 1..9: note = Seed: LVVVGAGDV (KRAS G13D)
MVVNGSGDM

SEQ ID NO: 80421 - protein, 9 aa, synthetic construct
  source 1..9: note = Seed: LVVVGAGDV (KRAS G13D)
MVVNGSGDV

SEQ ID NO: 80422 - protein, 9 aa, synthetic construct
  source 1..9: note = Seed: LVVVGAGDV (KRAS G13D)
MVVNGSGDY

SEQ ID NO: 80423 - protein, 9 aa, synthetic construct
  source 1..9: note = Seed: LVVVGAGDV (KRAS G13D)
MVVNGTGDF

SEQ ID NO: 80424 - protein, 9 aa, synthetic construct
  source 1..9: note = Seed: LVVVGAGDV (KRAS G13D)
MVVNGTGDI

SEQ ID NO: 80425 - protein, 9 aa, synthetic construct
  source 1..9: note = Seed: LVVVGAGDV (KRAS G13D)
MVVNGTGDL

SEQ ID NO: 80426 - protein, 9 aa, synthetic construct
  source 1..9: note = Seed: LVVVGAGDV (KRAS G13D)
MVVNGTGDM

SEQ ID NO: 80427 - protein, 9 aa, synthetic construct
  source 1..9: note = Seed: LVVVGAGDV (KRAS G13D)
MVVNGTGDV

SEQ ID NO: 80428 - protein, 9 aa, synthetic construct
  source 1..9: note = Seed: LVVVGAGDV (KRAS G13D)
MVVNGVGDF

SEQ ID NO: 80429 - protein, 9 aa, synthetic construct
  source 1..9: note = Seed: LVVVGAGDV (KRAS G13D)
MVVNGVGDI

SEQ ID NO: 80430 - protein, 9 aa, synthetic construct
  source 1..9: note = Seed: LVVVGAGDV (KRAS G13D)
MVVNGVGDL

SEQ ID NO: 80431 - protein, 9 aa, synthetic construct
  source 1..9: note = Seed: LVVVGAGDV (KRAS G13D)
MVVNGVGDM

SEQ ID NO: 80432 - protein, 9 aa, synthetic construct
  source 1..9: note = Seed: LVVVGAGDV (KRAS G13D)
MVVNGVGDV

SEQ ID NO: 80433 - protein, 9 aa, synthetic construct
  source 1..9: note = Seed: LVVVGAGDV (KRAS G13D)
MVVNGVGDY

SEQ ID NO: 80434 - protein, 9 aa, synthetic construct
  source 1..9: note = Seed: LVVVGAGDV (KRAS G13D)
MVVQGAGDL

SEQ ID NO: 80435 - protein, 9 aa, synthetic construct
  source 1..9: note = Seed: LVVVGAGDV (KRAS G13D)
MVVQGAGDV

SEQ ID NO: 80436 - protein, 9 aa, synthetic construct
  source 1..9: note = Seed: LVVVGAGDV (KRAS G13D)
MVVRGKGDA

SEQ ID NO: 80437 - protein, 9 aa, synthetic construct
  source 1..9: note = Seed: LVVVGAGDV (KRAS G13D)
MVVSGAGDA

SEQ ID NO: 80438 - protein, 9 aa, synthetic construct
  source 1..9: note = Seed: LVVVGAGDV (KRAS G13D)
MVVSGAGDI

SEQ ID NO: 80439 - protein, 9 aa, synthetic construct
  source 1..9: note = Seed: LVVVGAGDV (KRAS G13D)
MVVSGAGDL

SEQ ID NO: 80440 - protein, 9 aa, synthetic construct
  source 1..9: note = Seed: LVVVGAGDV (KRAS G13D)
MVVSGAGDV

SEQ ID NO: 80441 - protein, 9 aa, synthetic construct
  source 1..9: note = Seed: LVVVGAGDV (KRAS G13D)
MVVSGNGDI

SEQ ID NO: 80442 - protein, 9 aa, synthetic construct
  source 1..9: note = Seed: LVVVGAGDV (KRAS G13D)
MVVSGSGDI

SEQ ID NO: 80443 - protein, 9 aa, synthetic construct
  source 1..9: note = Seed: LVVVGAGDV (KRAS G13D)
MVVSGSGDL

SEQ ID NO: 80444 - protein, 9 aa, synthetic construct
  source 1..9: note = Seed: LVVVGAGDV (KRAS G13D)
MVVSGSGDV

SEQ ID NO: 80445 - protein, 9 aa, synthetic construct
  source 1..9: note = Seed: LVVVGAGDV (KRAS G13D)
MVVTGFGDI

SEQ ID NO: 80446 - protein, 9 aa, synthetic construct
  source 1..9: note = Seed: LVVVGAGDV (KRAS G13D)
MVVTGFGDL

SEQ ID NO: 80447 - protein, 9 aa, synthetic construct
  source 1..9: note = Seed: LVVVGAGDV (KRAS G13D)
MVVTGFGDV

SEQ ID NO: 80448 - protein, 9 aa, synthetic construct
  source 1..9: note = Seed: LVVVGAGDV (KRAS G13D)
MVVTGSGDI

SEQ ID NO: 80449 - protein, 9 aa, synthetic construct
  source 1..9: note = Seed: LVVVGAGDV (KRAS G13D)
MVVTGSGDL

SEQ ID NO: 80450 - protein, 9 aa, synthetic construct
  source 1..9: note = Seed: LVVVGAGDV (KRAS G13D)
MVVVGAGDI

SEQ ID NO: 80451 - protein, 9 aa, synthetic construct
  source 1..9: note = Seed: LVVVGAGDV (KRAS G13D)
MVVVGAGDL

SEQ ID NO: 80452 - protein, 9 aa, synthetic construct
  source 1..9: note = Seed: LVVVGAGDV (KRAS G13D)
MVVVGAGDV

SEQ ID NO: 80453 - protein, 9 aa, synthetic construct
  source 1..9: note = Seed: LVVVGAGDV (KRAS G13D)
MVVVGGGDL

SEQ ID NO: 80454 - protein, 9 aa, synthetic construct
  source 1..9: note = Seed: LVVVGAGDV (KRAS G13D)
MVVVGGGDV

SEQ ID NO: 80455 - protein, 9 aa, synthetic construct
  source 1..9: note = Seed: LVVVGAGDV (KRAS G13D)
MVVVGKGDA

SEQ ID NO: 80456 - protein, 9 aa, synthetic construct
  source 1..9: note = Seed: LVVVGAGDV (KRAS G13D)
MVVVGKGDS

SEQ ID NO: 80457 - protein, 9 aa, synthetic construct
  source 1..9: note = Seed: LVVVGAGDV (KRAS G13D)
MVVVGRGDA

SEQ ID NO: 80458 - protein, 9 aa, synthetic construct
  source 1..9: note = Seed: LVVVGAGDV (KRAS G13D)
MVVVGRGDH

SEQ ID NO: 80459 - protein, 9 aa, synthetic construct
  source 1..9: note = Seed: LVVVGAGDV (KRAS G13D)
MVVVGRGDQ

SEQ ID NO: 80460 - protein, 9 aa, synthetic construct
  source 1..9: note = Seed: LVVVGAGDV (KRAS G13D)
MVVVGRGDS

SEQ ID NO: 80461 - protein, 9 aa, synthetic construct
  source 1..9: note = Seed: LVVVGAGDV (KRAS G13D)
MVVVGRGDT

SEQ ID NO: 80462 - protein, 9 aa, synthetic construct
  source 1..9: note = Seed: LVVVGAGDV (KRAS G13D)
MVVVGSGDL

SEQ ID NO: 80463 - protein, 9 aa, synthetic construct
  source 1..9: note = Seed: LVVVGAGDV (KRAS G13D)
MVVVGSGDV

SEQ ID NO: 80464 - protein, 9 aa, synthetic construct
  source 1..9: note = Seed: LVVVGAGDV (KRAS G13D)
MVVWGNGDL

SEQ ID NO: 80465 - protein, 9 aa, synthetic construct
  source 1..9: note = Seed: LVVVGAGDV (KRAS G13D)
MVVYGGGDL

SEQ ID NO: 80466 - protein, 9 aa, synthetic construct
  source 1..9: note = Seed: LVVVGAGDV (KRAS G13D)
MVVYGNGDA

SEQ ID NO: 80467 - protein, 9 aa, synthetic construct
  source 1..9: note = Seed: LVVVGAGDV (KRAS G13D)
MVVYGNGDI

SEQ ID NO: 80468 - protein, 9 aa, synthetic construct
  source 1..9: note = Seed: LVVVGAGDV (KRAS G13D)
MVVYGNGDL

SEQ ID NO: 80469 - protein, 9 aa, synthetic construct
  source 1..9: note = Seed: LVVVGAGDV (KRAS G13D)
MVVYGNGDM

SEQ ID NO: 80470 - protein, 9 aa, synthetic construct
  source 1..9: note = Seed: LVVVGAGDV (KRAS G13D)
MVVYGNGDV

SEQ ID NO: 80471 - protein, 9 aa, synthetic construct
  source 1..9: note = Seed: LVVVGAGDV (KRAS G13D)
MVVYGSGDA

SEQ ID NO: 80472 - protein, 9 aa, synthetic construct
  source 1..9: note = Seed: LVVVGAGDV (KRAS G13D)
MVVYGSGDI

SEQ ID NO: 80473 - protein, 9 aa, synthetic construct
  source 1..9: note = Seed: LVVVGAGDV (KRAS G13D)
MVVYGSGDL

SEQ ID NO: 80474 - protein, 9 aa, synthetic construct
  source 1..9: note = Seed: LVVVGAGDV (KRAS G13D)
MVVYGSGDM

SEQ ID NO: 80475 - protein, 9 aa, synthetic construct
  source 1..9: note = Seed: LVVVGAGDV (KRAS G13D)
MVVYGSGDV

SEQ ID NO: 80476 - protein, 9 aa, synthetic construct
  source 1..9: note = Seed: LVVVGAGDV (KRAS G13D)
MVVYGTGDL

SEQ ID NO: 80477 - protein, 9 aa, synthetic construct
  source 1..9: note = Seed: LVVVGAGDV (KRAS G13D)
VVVAGAGDA

SEQ ID NO: 80478 - protein, 9 aa, synthetic construct
  source 1..9: note = Seed: LVVVGAGDV (KRAS G13D)
VVVAGAGDI

SEQ ID NO: 80479 - protein, 9 aa, synthetic construct
  source 1..9: note = Seed: LVVVGAGDV (KRAS G13D)
VVVAGAGDL

SEQ ID NO: 80480 - protein, 9 aa, synthetic construct
  source 1..9: note = Seed: LVVVGAGDV (KRAS G13D)
VVVAGAGDM

SEQ ID NO: 80481 - protein, 9 aa, synthetic construct
  source 1..9: note = Seed: LVVVGAGDV (KRAS G13D)
VVVAGAGDV

SEQ ID NO: 80482 - protein, 9 aa, synthetic construct
  source 1..9: note = Seed: LVVVGAGDV (KRAS G13D)
VVVAGGGDL

SEQ ID NO: 80483 - protein, 9 aa, synthetic construct
  source 1..9: note = Seed: LVVVGAGDV (KRAS G13D)
VVVAGSGDA

SEQ ID NO: 80484 - protein, 9 aa, synthetic construct
  source 1..9: note = Seed: LVVVGAGDV (KRAS G13D)
VVVAGSGDI

SEQ ID NO: 80485 - protein, 9 aa, synthetic construct
  source 1..9: note = Seed: LVVVGAGDV (KRAS G13D)
VVVAGSGDL

SEQ ID NO: 80486 - protein, 9 aa, synthetic construct
  source 1..9: note = Seed: LVVVGAGDV (KRAS G13D)
VVVAGSGDV

SEQ ID NO: 80487 - protein, 9 aa, synthetic construct
  source 1..9: note = Seed: LVVVGAGDV (KRAS G13D)
VVVFGAGDL

SEQ ID NO: 80488 - protein, 9 aa, synthetic construct
  source 1..9: note = Seed: LVVVGAGDV (KRAS G13D)
VVVFGGGDI

SEQ ID NO: 80489 - protein, 9 aa, synthetic construct
  source 1..9: note = Seed: LVVVGAGDV (KRAS G13D)
VVVFGGGDL

SEQ ID NO: 80490 - protein, 9 aa, synthetic construct
  source 1..9: note = Seed: LVVVGAGDV (KRAS G13D)
VVVFGGGDV

SEQ ID NO: 80491 - protein, 9 aa, synthetic construct
  source 1..9: note = Seed: LVVVGAGDV (KRAS G13D)
VVVFGNGDA

SEQ ID NO: 80492 - protein, 9 aa, synthetic construct
  source 1..9: note = Seed: LVVVGAGDV (KRAS G13D)
VVVFGNGDI

SEQ ID NO: 80493 - protein, 9 aa, synthetic construct
  source 1..9: note = Seed: LVVVGAGDV (KRAS G13D)
VVVFGNGDL

SEQ ID NO: 80494 - protein, 9 aa, synthetic construct
  source 1..9: note = Seed: LVVVGAGDV (KRAS G13D)
VVVFGNGDM

SEQ ID NO: 80495 - protein, 9 aa, synthetic construct
  source 1..9: note = Seed: LVVVGAGDV (KRAS G13D)
VVVFGNGDT

SEQ ID NO: 80496 - protein, 9 aa, synthetic construct
  source 1..9: note = Seed: LVVVGAGDV (KRAS G13D)
VVVFGNGDV

SEQ ID NO: 80497 - protein, 9 aa, synthetic construct
  source 1..9: note = Seed: LVVVGAGDV (KRAS G13D)
VVVFGRGDA

SEQ ID NO: 80498 - protein, 9 aa, synthetic construct
  source 1..9: note = Seed: LVVVGAGDV (KRAS G13D)
VVVFGSGDA

SEQ ID NO: 80499 - protein, 9 aa, synthetic construct
  source 1..9: note = Seed: LVVVGAGDV (KRAS G13D)
VVVFGSGDI

SEQ ID NO: 80500 - protein, 9 aa, synthetic construct
  source 1..9: note = Seed: LVVVGAGDV (KRAS G13D)
VVVFGSGDL

SEQ ID NO: 80501 - protein, 9 aa, synthetic construct
  source 1..9: note = Seed: LVVVGAGDV (KRAS G13D)
VVVFGSGDM

SEQ ID NO: 80502 - protein, 9 aa, synthetic construct
  source 1..9: note = Seed: LVVVGAGDV (KRAS G13D)
VVVFGSGDT

SEQ ID NO: 80503 - protein, 9 aa, synthetic construct
  source 1..9: note = Seed: LVVVGAGDV (KRAS G13D)
VVVFGSGDV

SEQ ID NO: 80504 - protein, 9 aa, synthetic construct
  source 1..9: note = Seed: LVVVGAGDV (KRAS G13D)
VVVFGTGDI

SEQ ID NO: 80505 - protein, 9 aa, synthetic construct
  source 1..9: note = Seed: LVVVGAGDV (KRAS G13D)
VVVFGTGDL

SEQ ID NO: 80506 - protein, 9 aa, synthetic construct
  source 1..9: note = Seed: LVVVGAGDV (KRAS G13D)
VVVFGTGDV

SEQ ID NO: 80507 - protein, 9 aa, synthetic construct
  source 1..9: note = Seed: LVVVGAGDV (KRAS G13D)
VVVIGAGDA

SEQ ID NO: 80508 - protein, 9 aa, synthetic construct
  source 1..9: note = Seed: LVVVGAGDV (KRAS G13D)
VVVIGAGDI

SEQ ID NO: 80509 - protein, 9 aa, synthetic construct
  source 1..9: note = Seed: LVVVGAGDV (KRAS G13D)
VVVIGAGDL

SEQ ID NO: 80510 - protein, 9 aa, synthetic construct
  source 1..9: note = Seed: LVVVGAGDV (KRAS G13D)
VVVIGAGDV

SEQ ID NO: 80511 - protein, 9 aa, synthetic construct
  source 1..9: note = Seed: LVVVGAGDV (KRAS G13D)
VVVIGGGDA

SEQ ID NO: 80512 - protein, 9 aa, synthetic construct
  source 1..9: note = Seed: LVVVGAGDV (KRAS G13D)
VVVIGGGDI

SEQ ID NO: 80513 - protein, 9 aa, synthetic construct
  source 1..9: note = Seed: LVVVGAGDV (KRAS G13D)
VVVIGGGDL

SEQ ID NO: 80514 - protein, 9 aa, synthetic construct
  source 1..9: note = Seed: LVVVGAGDV (KRAS G13D)
VVVIGGGDV

SEQ ID NO: 80515 - protein, 9 aa, synthetic construct
  source 1..9: note = Seed: LVVVGAGDV (KRAS G13D)
VVVIGKGDA

SEQ ID NO: 80516 - protein, 9 aa, synthetic construct
  source 1..9: note = Seed: LVVVGAGDV (KRAS G13D)
VVVIGKGDS

SEQ ID NO: 80517 - protein, 9 aa, synthetic construct
  source 1..9: note = Seed: LVVVGAGDV (KRAS G13D)
VVVIGNGDA

SEQ ID NO: 80518 - protein, 9 aa, synthetic construct
  source 1..9: note = Seed: LVVVGAGDV (KRAS G13D)
VVVIGRGDA

SEQ ID NO: 80519 - protein, 9 aa, synthetic construct
  source 1..9: note = Seed: LVVVGAGDV (KRAS G13D)
VVVIGRGDH

SEQ ID NO: 80520 - protein, 9 aa, synthetic construct
  source 1..9: note = Seed: LVVVGAGDV (KRAS G13D)
VVVIGRGDM

SEQ ID NO: 80521 - protein, 9 aa, synthetic construct
  source 1..9: note = Seed: LVVVGAGDV (KRAS G13D)
VVVIGRGDQ

SEQ ID NO: 80522 - protein, 9 aa, synthetic construct
  source 1..9: note = Seed: LVVVGAGDV (KRAS G13D)
VVVIGRGDS

SEQ ID NO: 80523 - protein, 9 aa, synthetic construct
  source 1..9: note = Seed: LVVVGAGDV (KRAS G13D)
VVVIGRGDT

SEQ ID NO: 80524 - protein, 9 aa, synthetic construct
  source 1..9: note = Seed: LVVVGAGDV (KRAS G13D)
VVVIGSGDA

SEQ ID NO: 80525 - protein, 9 aa, synthetic construct
  source 1..9: note = Seed: LVVVGAGDV (KRAS G13D)
VVVIGSGDI

SEQ ID NO: 80526 - protein, 9 aa, synthetic construct
  source 1..9: note = Seed: LVVVGAGDV (KRAS G13D)
VVVIGSGDL

SEQ ID NO: 80527 - protein, 9 aa, synthetic construct
  source 1..9: note = Seed: LVVVGAGDV (KRAS G13D)
VVVIGSGDV

SEQ ID NO: 80528 - protein, 9 aa, synthetic construct
  source 1..9: note = Seed: LVVVGAGDV (KRAS G13D)
VVVKGRGDA

SEQ ID NO: 80529 - protein, 9 aa, synthetic construct
  source 1..9: note = Seed: LVVVGAGDV (KRAS G13D)
VVVLGAGDA

SEQ ID NO: 80530 - protein, 9 aa, synthetic construct
  source 1..9: note = Seed: LVVVGAGDV (KRAS G13D)
VVVLGAGDI

SEQ ID NO: 80531 - protein, 9 aa, synthetic construct
  source 1..9: note = Seed: LVVVGAGDV (KRAS G13D)
VVVLGAGDL

SEQ ID NO: 80532 - protein, 9 aa, synthetic construct
  source 1..9: note = Seed: LVVVGAGDV (KRAS G13D)
VVVLGAGDM

SEQ ID NO: 80533 - protein, 9 aa, synthetic construct
  source 1..9: note = Seed: LVVVGAGDV (KRAS G13D)
VVVLGAGDS

SEQ ID NO: 80534 - protein, 9 aa, synthetic construct
  source 1..9: note = Seed: LVVVGAGDV (KRAS G13D)
VVVLGAGDT

SEQ ID NO: 80535 - protein, 9 aa, synthetic construct
  source 1..9: note = Seed: LVVVGAGDV (KRAS G13D)
VVVLGAGDV

SEQ ID NO: 80536 - protein, 9 aa, synthetic construct
  source 1..9: note = Seed: LVVVGAGDV (KRAS G13D)
VVVLGGGDA

SEQ ID NO: 80537 - protein, 9 aa, synthetic construct
  source 1..9: note = Seed: LVVVGAGDV (KRAS G13D)
VVVLGGGDI

SEQ ID NO: 80538 - protein, 9 aa, synthetic construct
  source 1..9: note = Seed: LVVVGAGDV (KRAS G13D)
VVVLGGGDL

SEQ ID NO: 80539 - protein, 9 aa, synthetic construct
  source 1..9: note = Seed: LVVVGAGDV (KRAS G13D)
VVVLGGGDM

SEQ ID NO: 80540 - protein, 9 aa, synthetic construct
  source 1..9: note = Seed: LVVVGAGDV (KRAS G13D)
VVVLGGGDS

SEQ ID NO: 80541 - protein, 9 aa, synthetic construct
  source 1..9: note = Seed: LVVVGAGDV (KRAS G13D)
VVVLGGGDT

SEQ ID NO: 80542 - protein, 9 aa, synthetic construct
  source 1..9: note = Seed: LVVVGAGDV (KRAS G13D)
VVVLGGGDV

SEQ ID NO: 80543 - protein, 9 aa, synthetic construct
  source 1..9: note = Seed: LVVVGAGDV (KRAS G13D)
VVVLGKGDA

SEQ ID NO: 80544 - protein, 9 aa, synthetic construct
  source 1..9: note = Seed: LVVVGAGDV (KRAS G13D)
VVVLGKGDH

SEQ ID NO: 80545 - protein, 9 aa, synthetic construct
  source 1..9: note = Seed: LVVVGAGDV (KRAS G13D)
VVVLGKGDS

SEQ ID NO: 80546 - protein, 9 aa, synthetic construct
  source 1..9: note = Seed: LVVVGAGDV (KRAS G13D)
VVVLGKGDT

SEQ ID NO: 80547 - protein, 9 aa, synthetic construct
  source 1..9: note = Seed: LVVVGAGDV (KRAS G13D)
VVVLGNGDA

SEQ ID NO: 80548 - protein, 9 aa, synthetic construct
  source 1..9: note = Seed: LVVVGAGDV (KRAS G13D)
VVVLGNGDI

SEQ ID NO: 80549 - protein, 9 aa, synthetic construct
  source 1..9: note = Seed: LVVVGAGDV (KRAS G13D)
VVVLGNGDL

SEQ ID NO: 80550 - protein, 9 aa, synthetic construct
  source 1..9: note = Seed: LVVVGAGDV (KRAS G13D)
VVVLGNGDV

SEQ ID NO: 80551 - protein, 9 aa, synthetic construct
  source 1..9: note = Seed: LVVVGAGDV (KRAS G13D)
VVVLGPGDA

SEQ ID NO: 80552 - protein, 9 aa, synthetic construct
  source 1..9: note = Seed: LVVVGAGDV (KRAS G13D)
VVVLGPGDI

SEQ ID NO: 80553 - protein, 9 aa, synthetic construct
  source 1..9: note = Seed: LVVVGAGDV (KRAS G13D)
VVVLGPGDL

SEQ ID NO: 80554 - protein, 9 aa, synthetic construct
  source 1..9: note = Seed: LVVVGAGDV (KRAS G13D)
VVVLGPGDV

SEQ ID NO: 80555 - protein, 9 aa, synthetic construct
  source 1..9: note = Seed: LVVVGAGDV (KRAS G13D)
VVVLGRGDA

SEQ ID NO: 80556 - protein, 9 aa, synthetic construct
  source 1..9: note = Seed: LVVVGAGDV (KRAS G13D)
VVVLGRGDG

SEQ ID NO: 80557 - protein, 9 aa, synthetic construct
  source 1..9: note = Seed: LVVVGAGDV (KRAS G13D)
VVVLGRGDH

SEQ ID NO: 80558 - protein, 9 aa, synthetic construct
  source 1..9: note = Seed: LVVVGAGDV (KRAS G13D)
VVVLGRGDK

SEQ ID NO: 80559 - protein, 9 aa, synthetic construct
  source 1..9: note = Seed: LVVVGAGDV (KRAS G13D)
VVVLGRGDM

SEQ ID NO: 80560 - protein, 9 aa, synthetic construct
  source 1..9: note = Seed: LVVVGAGDV (KRAS G13D)
VVVLGRGDQ

SEQ ID NO: 80561 - protein, 9 aa, synthetic construct
  source 1..9: note = Seed: LVVVGAGDV (KRAS G13D)
VVVLGRGDS

SEQ ID NO: 80562 - protein, 9 aa, synthetic construct
  source 1..9: note = Seed: LVVVGAGDV (KRAS G13D)
VVVLGRGDT

SEQ ID NO: 80563 - protein, 9 aa, synthetic construct
  source 1..9: note = Seed: LVVVGAGDV (KRAS G13D)
VVVLGRGDV

SEQ ID NO: 80564 - protein, 9 aa, synthetic construct
  source 1..9: note = Seed: LVVVGAGDV (KRAS G13D)
VVVLGSGDA

SEQ ID NO: 80565 - protein, 9 aa, synthetic construct
  source 1..9: note = Seed: LVVVGAGDV (KRAS G13D)
VVVLGSGDI

SEQ ID NO: 80566 - protein, 9 aa, synthetic construct
  source 1..9: note = Seed: LVVVGAGDV (KRAS G13D)
VVVLGSGDL

SEQ ID NO: 80567 - protein, 9 aa, synthetic construct
  source 1..9: note = Seed: LVVVGAGDV (KRAS G13D)
VVVLGSGDM

SEQ ID NO: 80568 - protein, 9 aa, synthetic construct
  source 1..9: note = Seed: LVVVGAGDV (KRAS G13D)
VVVLGSGDS

SEQ ID NO: 80569 - protein, 9 aa, synthetic construct
  source 1..9: note = Seed: LVVVGAGDV (KRAS G13D)
VVVLGSGDT

SEQ ID NO: 80570 - protein, 9 aa, synthetic construct
  source 1..9: note = Seed: LVVVGAGDV (KRAS G13D)
VVVLGSGDV

SEQ ID NO: 80571 - protein, 9 aa, synthetic construct
  source 1..9: note = Seed: LVVVGAGDV (KRAS G13D)
VVVLGTGDA

SEQ ID NO: 80572 - protein, 9 aa, synthetic construct
  source 1..9: note = Seed: LVVVGAGDV (KRAS G13D)
VVVLGTGDI

SEQ ID NO: 80573 - protein, 9 aa, synthetic construct
  source 1..9: note = Seed: LVVVGAGDV (KRAS G13D)
VVVLGTGDL

SEQ ID NO: 80574 - protein, 9 aa, synthetic construct
  source 1..9: note = Seed: LVVVGAGDV (KRAS G13D)
VVVLGTGDM

SEQ ID NO: 80575 - protein, 9 aa, synthetic construct
  source 1..9: note = Seed: LVVVGAGDV (KRAS G13D)
VVVLGTGDV

SEQ ID NO: 80576 - protein, 9 aa, synthetic construct
  source 1..9: note = Seed: LVVVGAGDV (KRAS G13D)
VVVMGAGDA

SEQ ID NO: 80577 - protein, 9 aa, synthetic construct
  source 1..9: note = Seed: LVVVGAGDV (KRAS G13D)
VVVMGAGDI

SEQ ID NO: 80578 - protein, 9 aa, synthetic construct
  source 1..9: note = Seed: LVVVGAGDV (KRAS G13D)
VVVMGAGDL

SEQ ID NO: 80579 - protein, 9 aa, synthetic construct
  source 1..9: note = Seed: LVVVGAGDV (KRAS G13D)
VVVMGAGDM

SEQ ID NO: 80580 - protein, 9 aa, synthetic construct
  source 1..9: note = Seed: LVVVGAGDV (KRAS G13D)
VVVMGAGDT

SEQ ID NO: 80581 - protein, 9 aa, synthetic construct
  source 1..9: note = Seed: LVVVGAGDV (KRAS G13D)
VVVMGAGDV

SEQ ID NO: 80582 - protein, 9 aa, synthetic construct
  source 1..9: note = Seed: LVVVGAGDV (KRAS G13D)
VVVMGGGDA

SEQ ID NO: 80583 - protein, 9 aa, synthetic construct
  source 1..9: note = Seed: LVVVGAGDV (KRAS G13D)
VVVMGGGDI

SEQ ID NO: 80584 - protein, 9 aa, synthetic construct
  source 1..9: note = Seed: LVVVGAGDV (KRAS G13D)
VVVMGGGDL

SEQ ID NO: 80585 - protein, 9 aa, synthetic construct
  source 1..9: note = Seed: LVVVGAGDV (KRAS G13D)
VVVMGGGDM

SEQ ID NO: 80586 - protein, 9 aa, synthetic construct
  source 1..9: note = Seed: LVVVGAGDV (KRAS G13D)
VVVMGGGDT

SEQ ID NO: 80587 - protein, 9 aa, synthetic construct
  source 1..9: note = Seed: LVVVGAGDV (KRAS G13D)
VVVMGGGDV

SEQ ID NO: 80588 - protein, 9 aa, synthetic construct
  source 1..9: note = Seed: LVVVGAGDV (KRAS G13D)
VVVMGKGDA

SEQ ID NO: 80589 - protein, 9 aa, synthetic construct
  source 1..9: note = Seed: LVVVGAGDV (KRAS G13D)
VVVMGKGDH

SEQ ID NO: 80590 - protein, 9 aa, synthetic construct
  source 1..9: note = Seed: LVVVGAGDV (KRAS G13D)
VVVMGKGDM

SEQ ID NO: 80591 - protein, 9 aa, synthetic construct
  source 1..9: note = Seed: LVVVGAGDV (KRAS G13D)
VVVMGKGDS

SEQ ID NO: 80592 - protein, 9 aa, synthetic construct
  source 1..9: note = Seed: LVVVGAGDV (KRAS G13D)
VVVMGKGDT

SEQ ID NO: 80593 - protein, 9 aa, synthetic construct
  source 1..9: note = Seed: LVVVGAGDV (KRAS G13D)
VVVMGNGDA

SEQ ID NO: 80594 - protein, 9 aa, synthetic construct
  source 1..9: note = Seed: LVVVGAGDV (KRAS G13D)
VVVMGNGDI

SEQ ID NO: 80595 - protein, 9 aa, synthetic construct
  source 1..9: note = Seed: LVVVGAGDV (KRAS G13D)
VVVMGNGDL

SEQ ID NO: 80596 - protein, 9 aa, synthetic construct
  source 1..9: note = Seed: LVVVGAGDV (KRAS G13D)
VVVMGNGDV

SEQ ID NO: 80597 - protein, 9 aa, synthetic construct
  source 1..9: note = Seed: LVVVGAGDV (KRAS G13D)
VVVMGPGDI

SEQ ID NO: 80598 - protein, 9 aa, synthetic construct
  source 1..9: note = Seed: LVVVGAGDV (KRAS G13D)
VVVMGPGDL

SEQ ID NO: 80599 - protein, 9 aa, synthetic construct
  source 1..9: note = Seed: LVVVGAGDV (KRAS G13D)
VVVMGPGDV

SEQ ID NO: 80600 - protein, 9 aa, synthetic construct
  source 1..9: note = Seed: LVVVGAGDV (KRAS G13D)
VVVMGRGDA

SEQ ID NO: 80601 - protein, 9 aa, synthetic construct
  source 1..9: note = Seed: LVVVGAGDV (KRAS G13D)
VVVMGRGDG

SEQ ID NO: 80602 - protein, 9 aa, synthetic construct
  source 1..9: note = Seed: LVVVGAGDV (KRAS G13D)
VVVMGRGDH

SEQ ID NO: 80603 - protein, 9 aa, synthetic construct
  source 1..9: note = Seed: LVVVGAGDV (KRAS G13D)
VVVMGRGDI

SEQ ID NO: 80604 - protein, 9 aa, synthetic construct
  source 1..9: note = Seed: LVVVGAGDV (KRAS G13D)
VVVMGRGDK

SEQ ID NO: 80605 - protein, 9 aa, synthetic construct
  source 1..9: note = Seed: LVVVGAGDV (KRAS G13D)
VVVMGRGDL

SEQ ID NO: 80606 - protein, 9 aa, synthetic construct
  source 1..9: note = Seed: LVVVGAGDV (KRAS G13D)
VVVMGRGDM

SEQ ID NO: 80607 - protein, 9 aa, synthetic construct
  source 1..9: note = Seed: LVVVGAGDV (KRAS G13D)
VVVMGRGDQ

SEQ ID NO: 80608 - protein, 9 aa, synthetic construct
  source 1..9: note = Seed: LVVVGAGDV (KRAS G13D)
VVVMGRGDR

SEQ ID NO: 80609 - protein, 9 aa, synthetic construct
  source 1..9: note = Seed: LVVVGAGDV (KRAS G13D)
VVVMGRGDS

SEQ ID NO: 80610 - protein, 9 aa, synthetic construct
  source 1..9: note = Seed: LVVVGAGDV (KRAS G13D)
VVVMGRGDT

SEQ ID NO: 80611 - protein, 9 aa, synthetic construct
  source 1..9: note = Seed: LVVVGAGDV (KRAS G13D)
VVVMGRGDV

SEQ ID NO: 80612 - protein, 9 aa, synthetic construct
  source 1..9: note = Seed: LVVVGAGDV (KRAS G13D)
VVVMGSGDA

SEQ ID NO: 80613 - protein, 9 aa, synthetic construct
  source 1..9: note = Seed: LVVVGAGDV (KRAS G13D)
VVVMGSGDI

SEQ ID NO: 80614 - protein, 9 aa, synthetic construct
  source 1..9: note = Seed: LVVVGAGDV (KRAS G13D)
VVVMGSGDL

SEQ ID NO: 80615 - protein, 9 aa, synthetic construct
  source 1..9: note = Seed: LVVVGAGDV (KRAS G13D)
VVVMGSGDM

SEQ ID NO: 80616 - protein, 9 aa, synthetic construct
  source 1..9: note = Seed: LVVVGAGDV (KRAS G13D)
VVVMGSGDT

SEQ ID NO: 80617 - protein, 9 aa, synthetic construct
  source 1..9: note = Seed: LVVVGAGDV (KRAS G13D)
VVVMGSGDV

SEQ ID NO: 80618 - protein, 9 aa, synthetic construct
  source 1..9: note = Seed: LVVVGAGDV (KRAS G13D)
VVVMGTGDI

SEQ ID NO: 80619 - protein, 9 aa, synthetic construct
  source 1..9: note = Seed: LVVVGAGDV (KRAS G13D)
VVVMGTGDL

SEQ ID NO: 80620 - protein, 9 aa, synthetic construct
  source 1..9: note = Seed: LVVVGAGDV (KRAS G13D)
VVVMGTGDM

SEQ ID NO: 80621 - protein, 9 aa, synthetic construct
  source 1..9: note = Seed: LVVVGAGDV (KRAS G13D)
VVVMGTGDV

SEQ ID NO: 80622 - protein, 9 aa, synthetic construct
  source 1..9: note = Seed: LVVVGAGDV (KRAS G13D)
VVVMGVGDL

SEQ ID NO: 80623 - protein, 9 aa, synthetic construct
  source 1..9: note = Seed: LVVVGAGDV (KRAS G13D)
VVVNGAGDF

SEQ ID NO: 80624 - protein, 9 aa, synthetic construct
  source 1..9: note = Seed: LVVVGAGDV (KRAS G13D)
VVVNGAGDI

SEQ ID NO: 80625 - protein, 9 aa, synthetic construct
  source 1..9: note = Seed: LVVVGAGDV (KRAS G13D)
VVVNGAGDL

SEQ ID NO: 80626 - protein, 9 aa, synthetic construct
  source 1..9: note = Seed: LVVVGAGDV (KRAS G13D)
VVVNGAGDM

SEQ ID NO: 80627 - protein, 9 aa, synthetic construct
  source 1..9: note = Seed: LVVVGAGDV (KRAS G13D)
VVVNGAGDV

SEQ ID NO: 80628 - protein, 9 aa, synthetic construct
  source 1..9: note = Seed: LVVVGAGDV (KRAS G13D)
VVVNGAGDY

SEQ ID NO: 80629 - protein, 9 aa, synthetic construct
  source 1..9: note = Seed: LVVVGAGDV (KRAS G13D)
VVVNGGGDI

SEQ ID NO: 80630 - protein, 9 aa, synthetic construct
  source 1..9: note = Seed: LVVVGAGDV (KRAS G13D)
VVVNGGGDL

SEQ ID NO: 80631 - protein, 9 aa, synthetic construct
  source 1..9: note = Seed: LVVVGAGDV (KRAS G13D)
VVVNGGGDM

SEQ ID NO: 80632 - protein, 9 aa, synthetic construct
  source 1..9: note = Seed: LVVVGAGDV (KRAS G13D)
VVVNGGGDV

SEQ ID NO: 80633 - protein, 9 aa, synthetic construct
  source 1..9: note = Seed: LVVVGAGDV (KRAS G13D)
VVVNGIGDF

SEQ ID NO: 80634 - protein, 9 aa, synthetic construct
  source 1..9: note = Seed: LVVVGAGDV (KRAS G13D)
VVVNGIGDI

SEQ ID NO: 80635 - protein, 9 aa, synthetic construct
  source 1..9: note = Seed: LVVVGAGDV (KRAS G13D)
VVVNGIGDL

SEQ ID NO: 80636 - protein, 9 aa, synthetic construct
  source 1..9: note = Seed: LVVVGAGDV (KRAS G13D)
VVVNGIGDM

SEQ ID NO: 80637 - protein, 9 aa, synthetic construct
  source 1..9: note = Seed: LVVVGAGDV (KRAS G13D)
VVVNGIGDV

SEQ ID NO: 80638 - protein, 9 aa, synthetic construct
  source 1..9: note = Seed: LVVVGAGDV (KRAS G13D)
VVVNGIGDY

SEQ ID NO: 80639 - protein, 9 aa, synthetic construct
  source 1..9: note = Seed: LVVVGAGDV (KRAS G13D)
VVVNGLGDI

SEQ ID NO: 80640 - protein, 9 aa, synthetic construct
  source 1..9: note = Seed: LVVVGAGDV (KRAS G13D)
VVVNGLGDL

SEQ ID NO: 80641 - protein, 9 aa, synthetic construct
  source 1..9: note = Seed: LVVVGAGDV (KRAS G13D)
VVVNGLGDV

SEQ ID NO: 80642 - protein, 9 aa, synthetic construct
  source 1..9: note = Seed: LVVVGAGDV (KRAS G13D)
VVVNGMGDI

SEQ ID NO: 80643 - protein, 9 aa, synthetic construct
  source 1..9: note = Seed: LVVVGAGDV (KRAS G13D)
VVVNGMGDV

SEQ ID NO: 80644 - protein, 9 aa, synthetic construct
  source 1..9: note = Seed: LVVVGAGDV (KRAS G13D)
VVVNGNGDF

SEQ ID NO: 80645 - protein, 9 aa, synthetic construct
  source 1..9: note = Seed: LVVVGAGDV (KRAS G13D)
VVVNGNGDI

SEQ ID NO: 80646 - protein, 9 aa, synthetic construct
  source 1..9: note = Seed: LVVVGAGDV (KRAS G13D)
VVVNGNGDL

SEQ ID NO: 80647 - protein, 9 aa, synthetic construct
  source 1..9: note = Seed: LVVVGAGDV (KRAS G13D)
VVVNGNGDM

SEQ ID NO: 80648 - protein, 9 aa, synthetic construct
  source 1..9: note = Seed: LVVVGAGDV (KRAS G13D)
VVVNGNGDV

SEQ ID NO: 80649 - protein, 9 aa, synthetic construct
  source 1..9: note = Seed: LVVVGAGDV (KRAS G13D)
VVVNGNGDY

SEQ ID NO: 80650 - protein, 9 aa, synthetic construct
  source 1..9: note = Seed: LVVVGAGDV (KRAS G13D)
VVVNGPGDI

SEQ ID NO: 80651 - protein, 9 aa, synthetic construct
  source 1..9: note = Seed: LVVVGAGDV (KRAS G13D)
VVVNGPGDL

SEQ ID NO: 80652 - protein, 9 aa, synthetic construct
  source 1..9: note = Seed: LVVVGAGDV (KRAS G13D)
VVVNGPGDV

SEQ ID NO: 80653 - protein, 9 aa, synthetic construct
  source 1..9: note = Seed: LVVVGAGDV (KRAS G13D)
VVVNGSGDF

SEQ ID NO: 80654 - protein, 9 aa, synthetic construct
  source 1..9: note = Seed: LVVVGAGDV (KRAS G13D)
VVVNGSGDI

SEQ ID NO: 80655 - protein, 9 aa, synthetic construct
  source 1..9: note = Seed: LVVVGAGDV (KRAS G13D)
VVVNGSGDL

SEQ ID NO: 80656 - protein, 9 aa, synthetic construct
  source 1..9: note = Seed: LVVVGAGDV (KRAS G13D)
VVVNGSGDM

SEQ ID NO: 80657 - protein, 9 aa, synthetic construct
  source 1..9: note = Seed: LVVVGAGDV (KRAS G13D)
VVVNGSGDV

SEQ ID NO: 80658 - protein, 9 aa, synthetic construct
  source 1..9: note = Seed: LVVVGAGDV (KRAS G13D)
VVVNGSGDY

SEQ ID NO: 80659 - protein, 9 aa, synthetic construct
  source 1..9: note = Seed: LVVVGAGDV (KRAS G13D)
VVVNGTGDF

SEQ ID NO: 80660 - protein, 9 aa, synthetic construct
  source 1..9: note = Seed: LVVVGAGDV (KRAS G13D)
VVVNGTGDI

SEQ ID NO: 80661 - protein, 9 aa, synthetic construct
  source 1..9: note = Seed: LVVVGAGDV (KRAS G13D)
VVVNGTGDL

SEQ ID NO: 80662 - protein, 9 aa, synthetic construct
  source 1..9: note = Seed: LVVVGAGDV (KRAS G13D)
VVVNGTGDM

SEQ ID NO: 80663 - protein, 9 aa, synthetic construct
  source 1..9: note = Seed: LVVVGAGDV (KRAS G13D)
VVVNGTGDV

SEQ ID NO: 80664 - protein, 9 aa, synthetic construct
  source 1..9: note = Seed: LVVVGAGDV (KRAS G13D)
VVVNGVGDF

SEQ ID NO: 80665 - protein, 9 aa, synthetic construct
  source 1..9: note = Seed: LVVVGAGDV (KRAS G13D)
VVVNGVGDI

SEQ ID NO: 80666 - protein, 9 aa, synthetic construct
  source 1..9: note = Seed: LVVVGAGDV (KRAS G13D)
VVVNGVGDL

SEQ ID NO: 80667 - protein, 9 aa, synthetic construct
  source 1..9: note = Seed: LVVVGAGDV (KRAS G13D)
VVVNGVGDM

SEQ ID NO: 80668 - protein, 9 aa, synthetic construct
  source 1..9: note = Seed: LVVVGAGDV (KRAS G13D)
VVVNGVGDV

SEQ ID NO: 80669 - protein, 9 aa, synthetic construct
  source 1..9: note = Seed: LVVVGAGDV (KRAS G13D)
VVVNGVGDY

SEQ ID NO: 80670 - protein, 9 aa, synthetic construct
  source 1..9: note = Seed: LVVVGAGDV (KRAS G13D)
VVVQGAGDL

SEQ ID NO: 80671 - protein, 9 aa, synthetic construct
  source 1..9: note = Seed: LVVVGAGDV (KRAS G13D)
VVVSGNGDI

SEQ ID NO: 80672 - protein, 9 aa, synthetic construct
  source 1..9: note = Seed: LVVVGAGDV (KRAS G13D)
VVVSGNGDV

SEQ ID NO: 80673 - protein, 9 aa, synthetic construct
  source 1..9: note = Seed: LVVVGAGDV (KRAS G13D)
VVVVGRGDA

SEQ ID NO: 80674 - protein, 9 aa, synthetic construct
  source 1..9: note = Seed: LVVVGAGDV (KRAS G13D)
VVVVGRGDH

SEQ ID NO: 80675 - protein, 9 aa, synthetic construct
  source 1..9: note = Seed: LVVVGAGDV (KRAS G13D)
VVVVGRGDS

SEQ ID NO: 80676 - protein, 9 aa, synthetic construct
  source 1..9: note = Seed: LVVVGAGDV (KRAS G13D)
VVVWGNGDI

SEQ ID NO: 80677 - protein, 9 aa, synthetic construct
  source 1..9: note = Seed: LVVVGAGDV (KRAS G13D)
VVVWGNGDL

SEQ ID NO: 80678 - protein, 9 aa, synthetic construct
  source 1..9: note = Seed: LVVVGAGDV (KRAS G13D)
VVVWGNGDV

SEQ ID NO: 80679 - protein, 9 aa, synthetic construct
  source 1..9: note = Seed: LVVVGAGDV (KRAS G13D)
VVVWGSGDI

SEQ ID NO: 80680 - protein, 9 aa, synthetic construct
  source 1..9: note = Seed: LVVVGAGDV (KRAS G13D)
VVVWGSGDL

SEQ ID NO: 80681 - protein, 9 aa, synthetic construct
  source 1..9: note = Seed: LVVVGAGDV (KRAS G13D)
VVVYGAGDL

SEQ ID NO: 80682 - protein, 9 aa, synthetic construct
  source 1..9: note = Seed: LVVVGAGDV (KRAS G13D)
VVVYGAGDV

SEQ ID NO: 80683 - protein, 9 aa, synthetic construct
  source 1..9: note = Seed: LVVVGAGDV (KRAS G13D)
VVVYGGGDL

SEQ ID NO: 80684 - protein, 9 aa, synthetic construct
  source 1..9: note = Seed: LVVVGAGDV (KRAS G13D)
VVVYGGGDV

SEQ ID NO: 80685 - protein, 9 aa, synthetic construct
  source 1..9: note = Seed: LVVVGAGDV (KRAS G13D)
VVVYGNGDA

SEQ ID NO: 80686 - protein, 9 aa, synthetic construct
  source 1..9: note = Seed: LVVVGAGDV (KRAS G13D)
VVVYGNGDI

SEQ ID NO: 80687 - protein, 9 aa, synthetic construct
  source 1..9: note = Seed: LVVVGAGDV (KRAS G13D)
VVVYGNGDL

SEQ ID NO: 80688 - protein, 9 aa, synthetic construct
  source 1..9: note = Seed: LVVVGAGDV (KRAS G13D)
VVVYGNGDM

SEQ ID NO: 80689 - protein, 9 aa, synthetic construct
  source 1..9: note = Seed: LVVVGAGDV (KRAS G13D)
VVVYGNGDT

SEQ ID NO: 80690 - protein, 9 aa, synthetic construct
  source 1..9: note = Seed: LVVVGAGDV (KRAS G13D)
VVVYGNGDV

SEQ ID NO: 80691 - protein, 9 aa, synthetic construct
  source 1..9: note = Seed: LVVVGAGDV (KRAS G13D)
VVVYGSGDA

SEQ ID NO: 80692 - protein, 9 aa, synthetic construct
  source 1..9: note = Seed: LVVVGAGDV (KRAS G13D)
VVVYGSGDI

SEQ ID NO: 80693 - protein, 9 aa, synthetic construct
  source 1..9: note = Seed: LVVVGAGDV (KRAS G13D)
VVVYGSGDL

SEQ ID NO: 80694 - protein, 9 aa, synthetic construct
  source 1..9: note = Seed: LVVVGAGDV (KRAS G13D)
VVVYGSGDM

SEQ ID NO: 80695 - protein, 9 aa, synthetic construct
  source 1..9: note = Seed: LVVVGAGDV (KRAS G13D)
VVVYGSGDT

SEQ ID NO: 80696 - protein, 9 aa, synthetic construct
  source 1..9: note = Seed: LVVVGAGDV (KRAS G13D)
VVVYGSGDV

SEQ ID NO: 80697 - protein, 9 aa, synthetic construct
  source 1..9: note = Seed: LVVVGAGDV (KRAS G13D)
VVVYGTGDI

SEQ ID NO: 80698 - protein, 9 aa, synthetic construct
  source 1..9: note = Seed: LVVVGAGDV (KRAS G13D)
VVVYGTGDL

SEQ ID NO: 80699 - protein, 9 aa, synthetic construct
  source 1..9: note = Seed: LVVVGAGDV (KRAS G13D)
VVVYGTGDV

SEQ ID NO: 80700 - protein, 9 aa, synthetic construct
  source 1..9: note = Seed: LVVVGAGDV (KRAS G13D)
WVVAGAGDA

SEQ ID NO: 80701 - protein, 9 aa, synthetic construct
  source 1..9: note = Seed: LVVVGAGDV (KRAS G13D)
WVVAGAGDF

SEQ ID NO: 80702 - protein, 9 aa, synthetic construct
  source 1..9: note = Seed: LVVVGAGDV (KRAS G13D)
WVVAGAGDG

SEQ ID NO: 80703 - protein, 9 aa, synthetic construct
  source 1..9: note = Seed: LVVVGAGDV (KRAS G13D)
WVVAGAGDI

SEQ ID NO: 80704 - protein, 9 aa, synthetic construct
  source 1..9: note = Seed: LVVVGAGDV (KRAS G13D)
WVVAGAGDL

SEQ ID NO: 80705 - protein, 9 aa, synthetic construct
  source 1..9: note = Seed: LVVVGAGDV (KRAS G13D)
WVVAGAGDM

SEQ ID NO: 80706 - protein, 9 aa, synthetic construct
  source 1..9: note = Seed: LVVVGAGDV (KRAS G13D)
WVVAGAGDS

SEQ ID NO: 80707 - protein, 9 aa, synthetic construct
  source 1..9: note = Seed: LVVVGAGDV (KRAS G13D)
WVVAGAGDT

SEQ ID NO: 80708 - protein, 9 aa, synthetic construct
  source 1..9: note = Seed: LVVVGAGDV (KRAS G13D)
WVVAGAGDV

SEQ ID NO: 80709 - protein, 9 aa, synthetic construct
  source 1..9: note = Seed: LVVVGAGDV (KRAS G13D)
WVVAGGGDA

SEQ ID NO: 80710 - protein, 9 aa, synthetic construct
  source 1..9: note = Seed: LVVVGAGDV (KRAS G13D)
WVVAGGGDI

SEQ ID NO: 80711 - protein, 9 aa, synthetic construct
  source 1..9: note = Seed: LVVVGAGDV (KRAS G13D)
WVVAGGGDL

SEQ ID NO: 80712 - protein, 9 aa, synthetic construct
  source 1..9: note = Seed: LVVVGAGDV (KRAS G13D)
WVVAGGGDM

SEQ ID NO: 80713 - protein, 9 aa, synthetic construct
  source 1..9: note = Seed: LVVVGAGDV (KRAS G13D)
WVVAGGGDS

SEQ ID NO: 80714 - protein, 9 aa, synthetic construct
  source 1..9: note = Seed: LVVVGAGDV (KRAS G13D)
WVVAGGGDT

SEQ ID NO: 80715 - protein, 9 aa, synthetic construct
  source 1..9: note = Seed: LVVVGAGDV (KRAS G13D)
WVVAGGGDV

SEQ ID NO: 80716 - protein, 9 aa, synthetic construct
  source 1..9: note = Seed: LVVVGAGDV (KRAS G13D)
WVVAGIGDA

SEQ ID NO: 80717 - protein, 9 aa, synthetic construct
  source 1..9: note = Seed: LVVVGAGDV (KRAS G13D)
WVVAGIGDI

SEQ ID NO: 80718 - protein, 9 aa, synthetic construct
  source 1..9: note = Seed: LVVVGAGDV (KRAS G13D)
WVVAGIGDL

SEQ ID NO: 80719 - protein, 9 aa, synthetic construct
  source 1..9: note = Seed: LVVVGAGDV (KRAS G13D)
WVVAGIGDM

SEQ ID NO: 80720 - protein, 9 aa, synthetic construct
  source 1..9: note = Seed: LVVVGAGDV (KRAS G13D)
WVVAGIGDN

SEQ ID NO: 80721 - protein, 9 aa, synthetic construct
  source 1..9: note = Seed: LVVVGAGDV (KRAS G13D)
WVVAGIGDS

SEQ ID NO: 80722 - protein, 9 aa, synthetic construct
  source 1..9: note = Seed: LVVVGAGDV (KRAS G13D)
WVVAGIGDV

SEQ ID NO: 80723 - protein, 9 aa, synthetic construct
  source 1..9: note = Seed: LVVVGAGDV (KRAS G13D)
WVVAGMGDI

SEQ ID NO: 80724 - protein, 9 aa, synthetic construct
  source 1..9: note = Seed: LVVVGAGDV (KRAS G13D)
WVVAGMGDL

SEQ ID NO: 80725 - protein, 9 aa, synthetic construct
  source 1..9: note = Seed: LVVVGAGDV (KRAS G13D)
WVVAGMGDV

SEQ ID NO: 80726 - protein, 9 aa, synthetic construct
  source 1..9: note = Seed: LVVVGAGDV (KRAS G13D)
WVVAGNGDA

SEQ ID NO: 80727 - protein, 9 aa, synthetic construct
  source 1..9: note = Seed: LVVVGAGDV (KRAS G13D)
WVVAGNGDI

SEQ ID NO: 80728 - protein, 9 aa, synthetic construct
  source 1..9: note = Seed: LVVVGAGDV (KRAS G13D)
WVVAGNGDL

SEQ ID NO: 80729 - protein, 9 aa, synthetic construct
  source 1..9: note = Seed: LVVVGAGDV (KRAS G13D)
WVVAGNGDM

SEQ ID NO: 80730 - protein, 9 aa, synthetic construct
  source 1..9: note = Seed: LVVVGAGDV (KRAS G13D)
WVVAGNGDS

SEQ ID NO: 80731 - protein, 9 aa, synthetic construct
  source 1..9: note = Seed: LVVVGAGDV (KRAS G13D)
WVVAGNGDT

SEQ ID NO: 80732 - protein, 9 aa, synthetic construct
  source 1..9: note = Seed: LVVVGAGDV (KRAS G13D)
WVVAGNGDV

SEQ ID NO: 80733 - protein, 9 aa, synthetic construct
  source 1..9: note = Seed: LVVVGAGDV (KRAS G13D)
WVVAGPGDA

SEQ ID NO: 80734 - protein, 9 aa, synthetic construct
  source 1..9: note = Seed: LVVVGAGDV (KRAS G13D)
WVVAGPGDI

SEQ ID NO: 80735 - protein, 9 aa, synthetic construct
  source 1..9: note = Seed: LVVVGAGDV (KRAS G13D)
WVVAGPGDL

SEQ ID NO: 80736 - protein, 9 aa, synthetic construct
  source 1..9: note = Seed: LVVVGAGDV (KRAS G13D)
WVVAGPGDM

SEQ ID NO: 80737 - protein, 9 aa, synthetic construct
  source 1..9: note = Seed: LVVVGAGDV (KRAS G13D)
WVVAGPGDV

SEQ ID NO: 80738 - protein, 9 aa, synthetic construct
  source 1..9: note = Seed: LVVVGAGDV (KRAS G13D)
WVVAGRGDA

SEQ ID NO: 80739 - protein, 9 aa, synthetic construct
  source 1..9: note = Seed: LVVVGAGDV (KRAS G13D)
WVVAGRGDS

SEQ ID NO: 80740 - protein, 9 aa, synthetic construct
  source 1..9: note = Seed: LVVVGAGDV (KRAS G13D)
WVVAGSGDA

SEQ ID NO: 80741 - protein, 9 aa, synthetic construct
  source 1..9: note = Seed: LVVVGAGDV (KRAS G13D)
WVVAGSGDI

SEQ ID NO: 80742 - protein, 9 aa, synthetic construct
  source 1..9: note = Seed: LVVVGAGDV (KRAS G13D)
WVVAGSGDL

SEQ ID NO: 80743 - protein, 9 aa, synthetic construct
  source 1..9: note = Seed: LVVVGAGDV (KRAS G13D)
WVVAGSGDM

SEQ ID NO: 80744 - protein, 9 aa, synthetic construct
  source 1..9: note = Seed: LVVVGAGDV (KRAS G13D)
WVVAGSGDS

SEQ ID NO: 80745 - protein, 9 aa, synthetic construct
  source 1..9: note = Seed: LVVVGAGDV (KRAS G13D)
WVVAGSGDT

SEQ ID NO: 80746 - protein, 9 aa, synthetic construct
  source 1..9: note = Seed: LVVVGAGDV (KRAS G13D)
WVVAGSGDV

SEQ ID NO: 80747 - protein, 9 aa, synthetic construct
  source 1..9: note = Seed: LVVVGAGDV (KRAS G13D)
WVVAGTGDA

SEQ ID NO: 80748 - protein, 9 aa, synthetic construct
  source 1..9: note = Seed: LVVVGAGDV (KRAS G13D)
WVVAGTGDI

SEQ ID NO: 80749 - protein, 9 aa, synthetic construct
  source 1..9: note = Seed: LVVVGAGDV (KRAS G13D)
WVVAGTGDL

SEQ ID NO: 80750 - protein, 9 aa, synthetic construct
  source 1..9: note = Seed: LVVVGAGDV (KRAS G13D)
WVVAGTGDM

SEQ ID NO: 80751 - protein, 9 aa, synthetic construct
  source 1..9: note = Seed: LVVVGAGDV (KRAS G13D)
WVVAGTGDV

SEQ ID NO: 80752 - protein, 9 aa, synthetic construct
  source 1..9: note = Seed: LVVVGAGDV (KRAS G13D)
WVVAGVGDA

SEQ ID NO: 80753 - protein, 9 aa, synthetic construct
  source 1..9: note = Seed: LVVVGAGDV (KRAS G13D)
WVVAGVGDI

SEQ ID NO: 80754 - protein, 9 aa, synthetic construct
  source 1..9: note = Seed: LVVVGAGDV (KRAS G13D)
WVVAGVGDL

SEQ ID NO: 80755 - protein, 9 aa, synthetic construct
  source 1..9: note = Seed: LVVVGAGDV (KRAS G13D)
WVVAGVGDM

SEQ ID NO: 80756 - protein, 9 aa, synthetic construct
  source 1..9: note = Seed: LVVVGAGDV (KRAS G13D)
WVVAGVGDN

SEQ ID NO: 80757 - protein, 9 aa, synthetic construct
  source 1..9: note = Seed: LVVVGAGDV (KRAS G13D)
WVVAGVGDS

SEQ ID NO: 80758 - protein, 9 aa, synthetic construct
  source 1..9: note = Seed: LVVVGAGDV (KRAS G13D)
WVVAGVGDV

SEQ ID NO: 80759 - protein, 9 aa, synthetic construct
  source 1..9: note = Seed: LVVVGAGDV (KRAS G13D)
WVVEGAGDA

SEQ ID NO: 80760 - protein, 9 aa, synthetic construct
  source 1..9: note = Seed: LVVVGAGDV (KRAS G13D)
WVVEGAGDI

SEQ ID NO: 80761 - protein, 9 aa, synthetic construct
  source 1..9: note = Seed: LVVVGAGDV (KRAS G13D)
WVVEGAGDL

SEQ ID NO: 80762 - protein, 9 aa, synthetic construct
  source 1..9: note = Seed: LVVVGAGDV (KRAS G13D)
WVVEGAGDV

SEQ ID NO: 80763 - protein, 9 aa, synthetic construct
  source 1..9: note = Seed: LVVVGAGDV (KRAS G13D)
WVVEGFGDI

SEQ ID NO: 80764 - protein, 9 aa, synthetic construct
  source 1..9: note = Seed: LVVVGAGDV (KRAS G13D)
WVVEGGGDL

SEQ ID NO: 80765 - protein, 9 aa, synthetic construct
  source 1..9: note = Seed: LVVVGAGDV (KRAS G13D)
WVVEGSGDL

SEQ ID NO: 80766 - protein, 9 aa, synthetic construct
  source 1..9: note = Seed: LVVVGAGDV (KRAS G13D)
WVVEGSGDV

SEQ ID NO: 80767 - protein, 9 aa, synthetic construct
  source 1..9: note = Seed: LVVVGAGDV (KRAS G13D)
WVVFGAGDA

SEQ ID NO: 80768 - protein, 9 aa, synthetic construct
  source 1..9: note = Seed: LVVVGAGDV (KRAS G13D)
WVVFGAGDI

SEQ ID NO: 80769 - protein, 9 aa, synthetic construct
  source 1..9: note = Seed: LVVVGAGDV (KRAS G13D)
WVVFGAGDL

SEQ ID NO: 80770 - protein, 9 aa, synthetic construct
  source 1..9: note = Seed: LVVVGAGDV (KRAS G13D)
WVVFGAGDM

SEQ ID NO: 80771 - protein, 9 aa, synthetic construct
  source 1..9: note = Seed: LVVVGAGDV (KRAS G13D)
WVVFGAGDV

SEQ ID NO: 80772 - protein, 9 aa, synthetic construct
  source 1..9: note = Seed: LVVVGAGDV (KRAS G13D)
WVVFGGGDL

SEQ ID NO: 80773 - protein, 9 aa, synthetic construct
  source 1..9: note = Seed: LVVVGAGDV (KRAS G13D)
WVVFGGGDV

SEQ ID NO: 80774 - protein, 9 aa, synthetic construct
  source 1..9: note = Seed: LVVVGAGDV (KRAS G13D)
WVVFGNGDL

SEQ ID NO: 80775 - protein, 9 aa, synthetic construct
  source 1..9: note = Seed: LVVVGAGDV (KRAS G13D)
WVVFGSGDI

SEQ ID NO: 80776 - protein, 9 aa, synthetic construct
  source 1..9: note = Seed: LVVVGAGDV (KRAS G13D)
WVVFGSGDL

SEQ ID NO: 80777 - protein, 9 aa, synthetic construct
  source 1..9: note = Seed: LVVVGAGDV (KRAS G13D)
WVVFGSGDV

SEQ ID NO: 80778 - protein, 9 aa, synthetic construct
  source 1..9: note = Seed: LVVVGAGDV (KRAS G13D)
WVVGGAGDI

SEQ ID NO: 80779 - protein, 9 aa, synthetic construct
  source 1..9: note = Seed: LVVVGAGDV (KRAS G13D)
WVVGGAGDL

SEQ ID NO: 80780 - protein, 9 aa, synthetic construct
  source 1..9: note = Seed: LVVVGAGDV (KRAS G13D)
WVVGGAGDV

SEQ ID NO: 80781 - protein, 9 aa, synthetic construct
  source 1..9: note = Seed: LVVVGAGDV (KRAS G13D)
WVVHGAGDL

SEQ ID NO: 80782 - protein, 9 aa, synthetic construct
  source 1..9: note = Seed: LVVVGAGDV (KRAS G13D)
WVVIGAGDA

SEQ ID NO: 80783 - protein, 9 aa, synthetic construct
  source 1..9: note = Seed: LVVVGAGDV (KRAS G13D)
WVVIGAGDG

SEQ ID NO: 80784 - protein, 9 aa, synthetic construct
  source 1..9: note = Seed: LVVVGAGDV (KRAS G13D)
WVVIGAGDI

SEQ ID NO: 80785 - protein, 9 aa, synthetic construct
  source 1..9: note = Seed: LVVVGAGDV (KRAS G13D)
WVVIGAGDL

SEQ ID NO: 80786 - protein, 9 aa, synthetic construct
  source 1..9: note = Seed: LVVVGAGDV (KRAS G13D)
WVVIGAGDM

SEQ ID NO: 80787 - protein, 9 aa, synthetic construct
  source 1..9: note = Seed: LVVVGAGDV (KRAS G13D)
WVVIGAGDN

SEQ ID NO: 80788 - protein, 9 aa, synthetic construct
  source 1..9: note = Seed: LVVVGAGDV (KRAS G13D)
WVVIGAGDS

SEQ ID NO: 80789 - protein, 9 aa, synthetic construct
  source 1..9: note = Seed: LVVVGAGDV (KRAS G13D)
WVVIGAGDT

SEQ ID NO: 80790 - protein, 9 aa, synthetic construct
  source 1..9: note = Seed: LVVVGAGDV (KRAS G13D)
WVVIGAGDV

SEQ ID NO: 80791 - protein, 9 aa, synthetic construct
  source 1..9: note = Seed: LVVVGAGDV (KRAS G13D)
WVVIGGGDA

SEQ ID NO: 80792 - protein, 9 aa, synthetic construct
  source 1..9: note = Seed: LVVVGAGDV (KRAS G13D)
WVVIGGGDI

SEQ ID NO: 80793 - protein, 9 aa, synthetic construct
  source 1..9: note = Seed: LVVVGAGDV (KRAS G13D)
WVVIGGGDL

SEQ ID NO: 80794 - protein, 9 aa, synthetic construct
  source 1..9: note = Seed: LVVVGAGDV (KRAS G13D)
WVVIGGGDM

SEQ ID NO: 80795 - protein, 9 aa, synthetic construct
  source 1..9: note = Seed: LVVVGAGDV (KRAS G13D)
WVVIGGGDS

SEQ ID NO: 80796 - protein, 9 aa, synthetic construct
  source 1..9: note = Seed: LVVVGAGDV (KRAS G13D)
WVVIGGGDT

SEQ ID NO: 80797 - protein, 9 aa, synthetic construct
  source 1..9: note = Seed: LVVVGAGDV (KRAS G13D)
WVVIGGGDV

SEQ ID NO: 80798 - protein, 9 aa, synthetic construct
  source 1..9: note = Seed: LVVVGAGDV (KRAS G13D)
WVVIGIGDA

SEQ ID NO: 80799 - protein, 9 aa, synthetic construct
  source 1..9: note = Seed: LVVVGAGDV (KRAS G13D)
WVVIGIGDN

SEQ ID NO: 80800 - protein, 9 aa, synthetic construct
  source 1..9: note = Seed: LVVVGAGDV (KRAS G13D)
WVVIGIGDS

SEQ ID NO: 80801 - protein, 9 aa, synthetic construct
  source 1..9: note = Seed: LVVVGAGDV (KRAS G13D)
WVVIGKGDA

SEQ ID NO: 80802 - protein, 9 aa, synthetic construct
  source 1..9: note = Seed: LVVVGAGDV (KRAS G13D)
WVVIGKGDQ

SEQ ID NO: 80803 - protein, 9 aa, synthetic construct
  source 1..9: note = Seed: LVVVGAGDV (KRAS G13D)
WVVIGKGDS

SEQ ID NO: 80804 - protein, 9 aa, synthetic construct
  source 1..9: note = Seed: LVVVGAGDV (KRAS G13D)
WVVIGKGDT

SEQ ID NO: 80805 - protein, 9 aa, synthetic construct
  source 1..9: note = Seed: LVVVGAGDV (KRAS G13D)
WVVIGNGDA

SEQ ID NO: 80806 - protein, 9 aa, synthetic construct
  source 1..9: note = Seed: LVVVGAGDV (KRAS G13D)
WVVIGNGDI

SEQ ID NO: 80807 - protein, 9 aa, synthetic construct
  source 1..9: note = Seed: LVVVGAGDV (KRAS G13D)
WVVIGNGDL

SEQ ID NO: 80808 - protein, 9 aa, synthetic construct
  source 1..9: note = Seed: LVVVGAGDV (KRAS G13D)
WVVIGNGDM

SEQ ID NO: 80809 - protein, 9 aa, synthetic construct
  source 1..9: note = Seed: LVVVGAGDV (KRAS G13D)
WVVIGNGDS

SEQ ID NO: 80810 - protein, 9 aa, synthetic construct
  source 1..9: note = Seed: LVVVGAGDV (KRAS G13D)
WVVIGNGDT

SEQ ID NO: 80811 - protein, 9 aa, synthetic construct
  source 1..9: note = Seed: LVVVGAGDV (KRAS G13D)
WVVIGNGDV

SEQ ID NO: 80812 - protein, 9 aa, synthetic construct
  source 1..9: note = Seed: LVVVGAGDV (KRAS G13D)
WVVIGPGDA

SEQ ID NO: 80813 - protein, 9 aa, synthetic construct
  source 1..9: note = Seed: LVVVGAGDV (KRAS G13D)
WVVIGPGDI

SEQ ID NO: 80814 - protein, 9 aa, synthetic construct
  source 1..9: note = Seed: LVVVGAGDV (KRAS G13D)
WVVIGPGDL

SEQ ID NO: 80815 - protein, 9 aa, synthetic construct
  source 1..9: note = Seed: LVVVGAGDV (KRAS G13D)
WVVIGPGDM

SEQ ID NO: 80816 - protein, 9 aa, synthetic construct
  source 1..9: note = Seed: LVVVGAGDV (KRAS G13D)
WVVIGPGDN

SEQ ID NO: 80817 - protein, 9 aa, synthetic construct
  source 1..9: note = Seed: LVVVGAGDV (KRAS G13D)
WVVIGPGDS

SEQ ID NO: 80818 - protein, 9 aa, synthetic construct
  source 1..9: note = Seed: LVVVGAGDV (KRAS G13D)
WVVIGPGDT

SEQ ID NO: 80819 - protein, 9 aa, synthetic construct
  source 1..9: note = Seed: LVVVGAGDV (KRAS G13D)
WVVIGPGDV

SEQ ID NO: 80820 - protein, 9 aa, synthetic construct
  source 1..9: note = Seed: LVVVGAGDV (KRAS G13D)
WVVIGRGDA

SEQ ID NO: 80821 - protein, 9 aa, synthetic construct
  source 1..9: note = Seed: LVVVGAGDV (KRAS G13D)
WVVIGRGDG

SEQ ID NO: 80822 - protein, 9 aa, synthetic construct
  source 1..9: note = Seed: LVVVGAGDV (KRAS G13D)
WVVIGRGDH

SEQ ID NO: 80823 - protein, 9 aa, synthetic construct
  source 1..9: note = Seed: LVVVGAGDV (KRAS G13D)
WVVIGRGDM

SEQ ID NO: 80824 - protein, 9 aa, synthetic construct
  source 1..9: note = Seed: LVVVGAGDV (KRAS G13D)
WVVIGRGDN

SEQ ID NO: 80825 - protein, 9 aa, synthetic construct
  source 1..9: note = Seed: LVVVGAGDV (KRAS G13D)
WVVIGRGDQ

SEQ ID NO: 80826 - protein, 9 aa, synthetic construct
  source 1..9: note = Seed: LVVVGAGDV (KRAS G13D)
WVVIGRGDS

SEQ ID NO: 80827 - protein, 9 aa, synthetic construct
  source 1..9: note = Seed: LVVVGAGDV (KRAS G13D)
WVVIGRGDT

SEQ ID NO: 80828 - protein, 9 aa, synthetic construct
  source 1..9: note = Seed: LVVVGAGDV (KRAS G13D)
WVVIGSGDA

SEQ ID NO: 80829 - protein, 9 aa, synthetic construct
  source 1..9: note = Seed: LVVVGAGDV (KRAS G13D)
WVVIGSGDI

SEQ ID NO: 80830 - protein, 9 aa, synthetic construct
  source 1..9: note = Seed: LVVVGAGDV (KRAS G13D)
WVVIGSGDL

SEQ ID NO: 80831 - protein, 9 aa, synthetic construct
  source 1..9: note = Seed: LVVVGAGDV (KRAS G13D)
WVVIGSGDM

SEQ ID NO: 80832 - protein, 9 aa, synthetic construct
  source 1..9: note = Seed: LVVVGAGDV (KRAS G13D)
WVVIGSGDN

SEQ ID NO: 80833 - protein, 9 aa, synthetic construct
  source 1..9: note = Seed: LVVVGAGDV (KRAS G13D)
WVVIGSGDS

SEQ ID NO: 80834 - protein, 9 aa, synthetic construct
  source 1..9: note = Seed: LVVVGAGDV (KRAS G13D)
WVVIGSGDT

SEQ ID NO: 80835 - protein, 9 aa, synthetic construct
  source 1..9: note = Seed: LVVVGAGDV (KRAS G13D)
WVVIGSGDV

SEQ ID NO: 80836 - protein, 9 aa, synthetic construct
  source 1..9: note = Seed: LVVVGAGDV (KRAS G13D)
WVVIGTGDA

SEQ ID NO: 80837 - protein, 9 aa, synthetic construct
  source 1..9: note = Seed: LVVVGAGDV (KRAS G13D)
WVVIGTGDI

SEQ ID NO: 80838 - protein, 9 aa, synthetic construct
  source 1..9: note = Seed: LVVVGAGDV (KRAS G13D)
WVVIGTGDL

SEQ ID NO: 80839 - protein, 9 aa, synthetic construct
  source 1..9: note = Seed: LVVVGAGDV (KRAS G13D)
WVVIGTGDM

SEQ ID NO: 80840 - protein, 9 aa, synthetic construct
  source 1..9: note = Seed: LVVVGAGDV (KRAS G13D)
WVVIGTGDN

SEQ ID NO: 80841 - protein, 9 aa, synthetic construct
  source 1..9: note = Seed: LVVVGAGDV (KRAS G13D)
WVVIGTGDS

SEQ ID NO: 80842 - protein, 9 aa, synthetic construct
  source 1..9: note = Seed: LVVVGAGDV (KRAS G13D)
WVVIGTGDT

SEQ ID NO: 80843 - protein, 9 aa, synthetic construct
  source 1..9: note = Seed: LVVVGAGDV (KRAS G13D)
WVVIGTGDV

SEQ ID NO: 80844 - protein, 9 aa, synthetic construct
  source 1..9: note = Seed: LVVVGAGDV (KRAS G13D)
WVVIGVGDA

SEQ ID NO: 80845 - protein, 9 aa, synthetic construct
  source 1..9: note = Seed: LVVVGAGDV (KRAS G13D)
WVVIGVGDL

SEQ ID NO: 80846 - protein, 9 aa, synthetic construct
  source 1..9: note = Seed: LVVVGAGDV (KRAS G13D)
WVVIGVGDN

SEQ ID NO: 80847 - protein, 9 aa, synthetic construct
  source 1..9: note = Seed: LVVVGAGDV (KRAS G13D)
WVVIGVGDS

SEQ ID NO: 80848 - protein, 9 aa, synthetic construct
  source 1..9: note = Seed: LVVVGAGDV (KRAS G13D)
WVVIGVGDV

SEQ ID NO: 80849 - protein, 9 aa, synthetic construct
  source 1..9: note = Seed: LVVVGAGDV (KRAS G13D)
WVVKGRGDA

SEQ ID NO: 80850 - protein, 9 aa, synthetic construct
  source 1..9: note = Seed: LVVVGAGDV (KRAS G13D)
WVVKGRGDS

SEQ ID NO: 80851 - protein, 9 aa, synthetic construct
  source 1..9: note = Seed: LVVVGAGDV (KRAS G13D)
WVVLGAGDA

SEQ ID NO: 80852 - protein, 9 aa, synthetic construct
  source 1..9: note = Seed: LVVVGAGDV (KRAS G13D)
WVVLGAGDC

SEQ ID NO: 80853 - protein, 9 aa, synthetic construct
  source 1..9: note = Seed: LVVVGAGDV (KRAS G13D)
WVVLGAGDF

SEQ ID NO: 80854 - protein, 9 aa, synthetic construct
  source 1..9: note = Seed: LVVVGAGDV (KRAS G13D)
WVVLGAGDG

SEQ ID NO: 80855 - protein, 9 aa, synthetic construct
  source 1..9: note = Seed: LVVVGAGDV (KRAS G13D)
WVVLGAGDH

SEQ ID NO: 80856 - protein, 9 aa, synthetic construct
  source 1..9: note = Seed: LVVVGAGDV (KRAS G13D)
WVVLGAGDI

SEQ ID NO: 80857 - protein, 9 aa, synthetic construct
  source 1..9: note = Seed: LVVVGAGDV (KRAS G13D)
WVVLGAGDL

SEQ ID NO: 80858 - protein, 9 aa, synthetic construct
  source 1..9: note = Seed: LVVVGAGDV (KRAS G13D)
WVVLGAGDM

SEQ ID NO: 80859 - protein, 9 aa, synthetic construct
  source 1..9: note = Seed: LVVVGAGDV (KRAS G13D)
WVVLGAGDN

SEQ ID NO: 80860 - protein, 9 aa, synthetic construct
  source 1..9: note = Seed: LVVVGAGDV (KRAS G13D)
WVVLGAGDQ

SEQ ID NO: 80861 - protein, 9 aa, synthetic construct
  source 1..9: note = Seed: LVVVGAGDV (KRAS G13D)
WVVLGAGDS

SEQ ID NO: 80862 - protein, 9 aa, synthetic construct
  source 1..9: note = Seed: LVVVGAGDV (KRAS G13D)
WVVLGAGDT

SEQ ID NO: 80863 - protein, 9 aa, synthetic construct
  source 1..9: note = Seed: LVVVGAGDV (KRAS G13D)
WVVLGAGDV

SEQ ID NO: 80864 - protein, 9 aa, synthetic construct
  source 1..9: note = Seed: LVVVGAGDV (KRAS G13D)
WVVLGGGDA

SEQ ID NO: 80865 - protein, 9 aa, synthetic construct
  source 1..9: note = Seed: LVVVGAGDV (KRAS G13D)
WVVLGGGDC

SEQ ID NO: 80866 - protein, 9 aa, synthetic construct
  source 1..9: note = Seed: LVVVGAGDV (KRAS G13D)
WVVLGGGDF

SEQ ID NO: 80867 - protein, 9 aa, synthetic construct
  source 1..9: note = Seed: LVVVGAGDV (KRAS G13D)
WVVLGGGDG

SEQ ID NO: 80868 - protein, 9 aa, synthetic construct
  source 1..9: note = Seed: LVVVGAGDV (KRAS G13D)
WVVLGGGDI

SEQ ID NO: 80869 - protein, 9 aa, synthetic construct
  source 1..9: note = Seed: LVVVGAGDV (KRAS G13D)
WVVLGGGDL

SEQ ID NO: 80870 - protein, 9 aa, synthetic construct
  source 1..9: note = Seed: LVVVGAGDV (KRAS G13D)
WVVLGGGDM

SEQ ID NO: 80871 - protein, 9 aa, synthetic construct
  source 1..9: note = Seed: LVVVGAGDV (KRAS G13D)
WVVLGGGDN

SEQ ID NO: 80872 - protein, 9 aa, synthetic construct
  source 1..9: note = Seed: LVVVGAGDV (KRAS G13D)
WVVLGGGDS

SEQ ID NO: 80873 - protein, 9 aa, synthetic construct
  source 1..9: note = Seed: LVVVGAGDV (KRAS G13D)
WVVLGGGDT

SEQ ID NO: 80874 - protein, 9 aa, synthetic construct
  source 1..9: note = Seed: LVVVGAGDV (KRAS G13D)
WVVLGGGDV

SEQ ID NO: 80875 - protein, 9 aa, synthetic construct
  source 1..9: note = Seed: LVVVGAGDV (KRAS G13D)
WVVLGHGDL

SEQ ID NO: 80876 - protein, 9 aa, synthetic construct
  source 1..9: note = Seed: LVVVGAGDV (KRAS G13D)
WVVLGIGDA

SEQ ID NO: 80877 - protein, 9 aa, synthetic construct
  source 1..9: note = Seed: LVVVGAGDV (KRAS G13D)
WVVLGIGDI

SEQ ID NO: 80878 - protein, 9 aa, synthetic construct
  source 1..9: note = Seed: LVVVGAGDV (KRAS G13D)
WVVLGIGDL

SEQ ID NO: 80879 - protein, 9 aa, synthetic construct
  source 1..9: note = Seed: LVVVGAGDV (KRAS G13D)
WVVLGIGDM

SEQ ID NO: 80880 - protein, 9 aa, synthetic construct
  source 1..9: note = Seed: LVVVGAGDV (KRAS G13D)
WVVLGIGDN

SEQ ID NO: 80881 - protein, 9 aa, synthetic construct
  source 1..9: note = Seed: LVVVGAGDV (KRAS G13D)
WVVLGIGDS

SEQ ID NO: 80882 - protein, 9 aa, synthetic construct
  source 1..9: note = Seed: LVVVGAGDV (KRAS G13D)
WVVLGIGDT

SEQ ID NO: 80883 - protein, 9 aa, synthetic construct
  source 1..9: note = Seed: LVVVGAGDV (KRAS G13D)
WVVLGIGDV

SEQ ID NO: 80884 - protein, 9 aa, synthetic construct
  source 1..9: note = Seed: LVVVGAGDV (KRAS G13D)
WVVLGKGDA

SEQ ID NO: 80885 - protein, 9 aa, synthetic construct
  source 1..9: note = Seed: LVVVGAGDV (KRAS G13D)
WVVLGKGDS

SEQ ID NO: 80886 - protein, 9 aa, synthetic construct
  source 1..9: note = Seed: LVVVGAGDV (KRAS G13D)
WVVLGKGDT

SEQ ID NO: 80887 - protein, 9 aa, synthetic construct
  source 1..9: note = Seed: LVVVGAGDV (KRAS G13D)
WVVLGMGDL

SEQ ID NO: 80888 - protein, 9 aa, synthetic construct
  source 1..9: note = Seed: LVVVGAGDV (KRAS G13D)
WVVLGNGDA

SEQ ID NO: 80889 - protein, 9 aa, synthetic construct
  source 1..9: note = Seed: LVVVGAGDV (KRAS G13D)
WVVLGNGDG

SEQ ID NO: 80890 - protein, 9 aa, synthetic construct
  source 1..9: note = Seed: LVVVGAGDV (KRAS G13D)
WVVLGNGDI

SEQ ID NO: 80891 - protein, 9 aa, synthetic construct
  source 1..9: note = Seed: LVVVGAGDV (KRAS G13D)
WVVLGNGDL

SEQ ID NO: 80892 - protein, 9 aa, synthetic construct
  source 1..9: note = Seed: LVVVGAGDV (KRAS G13D)
WVVLGNGDM

SEQ ID NO: 80893 - protein, 9 aa, synthetic construct
  source 1..9: note = Seed: LVVVGAGDV (KRAS G13D)
WVVLGNGDN

SEQ ID NO: 80894 - protein, 9 aa, synthetic construct
  source 1..9: note = Seed: LVVVGAGDV (KRAS G13D)
WVVLGNGDS

SEQ ID NO: 80895 - protein, 9 aa, synthetic construct
  source 1..9: note = Seed: LVVVGAGDV (KRAS G13D)
WVVLGNGDT

SEQ ID NO: 80896 - protein, 9 aa, synthetic construct
  source 1..9: note = Seed: LVVVGAGDV (KRAS G13D)
WVVLGNGDV

SEQ ID NO: 80897 - protein, 9 aa, synthetic construct
  source 1..9: note = Seed: LVVVGAGDV (KRAS G13D)
WVVLGPGDA

SEQ ID NO: 80898 - protein, 9 aa, synthetic construct
  source 1..9: note = Seed: LVVVGAGDV (KRAS G13D)
WVVLGPGDI

SEQ ID NO: 80899 - protein, 9 aa, synthetic construct
  source 1..9: note = Seed: LVVVGAGDV (KRAS G13D)
WVVLGPGDL

SEQ ID NO: 80900 - protein, 9 aa, synthetic construct
  source 1..9: note = Seed: LVVVGAGDV (KRAS G13D)
WVVLGPGDM

SEQ ID NO: 80901 - protein, 9 aa, synthetic construct
  source 1..9: note = Seed: LVVVGAGDV (KRAS G13D)
WVVLGPGDN

SEQ ID NO: 80902 - protein, 9 aa, synthetic construct
  source 1..9: note = Seed: LVVVGAGDV (KRAS G13D)
WVVLGPGDS

SEQ ID NO: 80903 - protein, 9 aa, synthetic construct
  source 1..9: note = Seed: LVVVGAGDV (KRAS G13D)
WVVLGPGDT

SEQ ID NO: 80904 - protein, 9 aa, synthetic construct
  source 1..9: note = Seed: LVVVGAGDV (KRAS G13D)
WVVLGPGDV

SEQ ID NO: 80905 - protein, 9 aa, synthetic construct
  source 1..9: note = Seed: LVVVGAGDV (KRAS G13D)
WVVLGRGDA

SEQ ID NO: 80906 - protein, 9 aa, synthetic construct
  source 1..9: note = Seed: LVVVGAGDV (KRAS G13D)
WVVLGRGDG

SEQ ID NO: 80907 - protein, 9 aa, synthetic construct
  source 1..9: note = Seed: LVVVGAGDV (KRAS G13D)
WVVLGRGDH

SEQ ID NO: 80908 - protein, 9 aa, synthetic construct
  source 1..9: note = Seed: LVVVGAGDV (KRAS G13D)
WVVLGRGDQ

SEQ ID NO: 80909 - protein, 9 aa, synthetic construct
  source 1..9: note = Seed: LVVVGAGDV (KRAS G13D)
WVVLGRGDS

SEQ ID NO: 80910 - protein, 9 aa, synthetic construct
  source 1..9: note = Seed: LVVVGAGDV (KRAS G13D)
WVVLGRGDT

SEQ ID NO: 80911 - protein, 9 aa, synthetic construct
  source 1..9: note = Seed: LVVVGAGDV (KRAS G13D)
WVVLGSGDA

SEQ ID NO: 80912 - protein, 9 aa, synthetic construct
  source 1..9: note = Seed: LVVVGAGDV (KRAS G13D)
WVVLGSGDC

SEQ ID NO: 80913 - protein, 9 aa, synthetic construct
  source 1..9: note = Seed: LVVVGAGDV (KRAS G13D)
WVVLGSGDF

SEQ ID NO: 80914 - protein, 9 aa, synthetic construct
  source 1..9: note = Seed: LVVVGAGDV (KRAS G13D)
WVVLGSGDG

SEQ ID NO: 80915 - protein, 9 aa, synthetic construct
  source 1..9: note = Seed: LVVVGAGDV (KRAS G13D)
WVVLGSGDI

SEQ ID NO: 80916 - protein, 9 aa, synthetic construct
  source 1..9: note = Seed: LVVVGAGDV (KRAS G13D)
WVVLGSGDL

SEQ ID NO: 80917 - protein, 9 aa, synthetic construct
  source 1..9: note = Seed: LVVVGAGDV (KRAS G13D)
WVVLGSGDM

SEQ ID NO: 80918 - protein, 9 aa, synthetic construct
  source 1..9: note = Seed: LVVVGAGDV (KRAS G13D)
WVVLGSGDN

SEQ ID NO: 80919 - protein, 9 aa, synthetic construct
  source 1..9: note = Seed: LVVVGAGDV (KRAS G13D)
WVVLGSGDS

SEQ ID NO: 80920 - protein, 9 aa, synthetic construct
  source 1..9: note = Seed: LVVVGAGDV (KRAS G13D)
WVVLGSGDT

SEQ ID NO: 80921 - protein, 9 aa, synthetic construct
  source 1..9: note = Seed: LVVVGAGDV (KRAS G13D)
WVVLGSGDV

SEQ ID NO: 80922 - protein, 9 aa, synthetic construct
  source 1..9: note = Seed: LVVVGAGDV (KRAS G13D)
WVVLGTGDA

SEQ ID NO: 80923 - protein, 9 aa, synthetic construct
  source 1..9: note = Seed: LVVVGAGDV (KRAS G13D)
WVVLGTGDI

SEQ ID NO: 80924 - protein, 9 aa, synthetic construct
  source 1..9: note = Seed: LVVVGAGDV (KRAS G13D)
WVVLGTGDL

SEQ ID NO: 80925 - protein, 9 aa, synthetic construct
  source 1..9: note = Seed: LVVVGAGDV (KRAS G13D)
WVVLGTGDM

SEQ ID NO: 80926 - protein, 9 aa, synthetic construct
  source 1..9: note = Seed: LVVVGAGDV (KRAS G13D)
WVVLGTGDN

SEQ ID NO: 80927 - protein, 9 aa, synthetic construct
  source 1..9: note = Seed: LVVVGAGDV (KRAS G13D)
WVVLGTGDS

SEQ ID NO: 80928 - protein, 9 aa, synthetic construct
  source 1..9: note = Seed: LVVVGAGDV (KRAS G13D)
WVVLGTGDT

SEQ ID NO: 80929 - protein, 9 aa, synthetic construct
  source 1..9: note = Seed: LVVVGAGDV (KRAS G13D)
WVVLGTGDV

SEQ ID NO: 80930 - protein, 9 aa, synthetic construct
  source 1..9: note = Seed: LVVVGAGDV (KRAS G13D)
WVVLGVGDA

SEQ ID NO: 80931 - protein, 9 aa, synthetic construct
  source 1..9: note = Seed: LVVVGAGDV (KRAS G13D)
WVVLGVGDI

SEQ ID NO: 80932 - protein, 9 aa, synthetic construct
  source 1..9: note = Seed: LVVVGAGDV (KRAS G13D)
WVVLGVGDL

SEQ ID NO: 80933 - protein, 9 aa, synthetic construct
  source 1..9: note = Seed: LVVVGAGDV (KRAS G13D)
WVVLGVGDM

SEQ ID NO: 80934 - protein, 9 aa, synthetic construct
  source 1..9: note = Seed: LVVVGAGDV (KRAS G13D)
WVVLGVGDN

SEQ ID NO: 80935 - protein, 9 aa, synthetic construct
  source 1..9: note = Seed: LVVVGAGDV (KRAS G13D)
WVVLGVGDS

SEQ ID NO: 80936 - protein, 9 aa, synthetic construct
  source 1..9: note = Seed: LVVVGAGDV (KRAS G13D)
WVVLGVGDT

SEQ ID NO: 80937 - protein, 9 aa, synthetic construct
  source 1..9: note = Seed: LVVVGAGDV (KRAS G13D)
WVVLGVGDV

SEQ ID NO: 80938 - protein, 9 aa, synthetic construct
  source 1..9: note = Seed: LVVVGAGDV (KRAS G13D)
WVVMGAGDA

SEQ ID NO: 80939 - protein, 9 aa, synthetic construct
  source 1..9: note = Seed: LVVVGAGDV (KRAS G13D)
WVVMGAGDC

SEQ ID NO: 80940 - protein, 9 aa, synthetic construct
  source 1..9: note = Seed: LVVVGAGDV (KRAS G13D)
WVVMGAGDF

SEQ ID NO: 80941 - protein, 9 aa, synthetic construct
  source 1..9: note = Seed: LVVVGAGDV (KRAS G13D)
WVVMGAGDG

SEQ ID NO: 80942 - protein, 9 aa, synthetic construct
  source 1..9: note = Seed: LVVVGAGDV (KRAS G13D)
WVVMGAGDH

SEQ ID NO: 80943 - protein, 9 aa, synthetic construct
  source 1..9: note = Seed: LVVVGAGDV (KRAS G13D)
WVVMGAGDI

SEQ ID NO: 80944 - protein, 9 aa, synthetic construct
  source 1..9: note = Seed: LVVVGAGDV (KRAS G13D)
WVVMGAGDL

SEQ ID NO: 80945 - protein, 9 aa, synthetic construct
  source 1..9: note = Seed: LVVVGAGDV (KRAS G13D)
WVVMGAGDM

SEQ ID NO: 80946 - protein, 9 aa, synthetic construct
  source 1..9: note = Seed: LVVVGAGDV (KRAS G13D)
WVVMGAGDN

SEQ ID NO: 80947 - protein, 9 aa, synthetic construct
  source 1..9: note = Seed: LVVVGAGDV (KRAS G13D)
WVVMGAGDQ

SEQ ID NO: 80948 - protein, 9 aa, synthetic construct
  source 1..9: note = Seed: LVVVGAGDV (KRAS G13D)
WVVMGAGDS

SEQ ID NO: 80949 - protein, 9 aa, synthetic construct
  source 1..9: note = Seed: LVVVGAGDV (KRAS G13D)
WVVMGAGDT

SEQ ID NO: 80950 - protein, 9 aa, synthetic construct
  source 1..9: note = Seed: LVVVGAGDV (KRAS G13D)
WVVMGAGDV

SEQ ID NO: 80951 - protein, 9 aa, synthetic construct
  source 1..9: note = Seed: LVVVGAGDV (KRAS G13D)
WVVMGGGDA

SEQ ID NO: 80952 - protein, 9 aa, synthetic construct
  source 1..9: note = Seed: LVVVGAGDV (KRAS G13D)
WVVMGGGDG

SEQ ID NO: 80953 - protein, 9 aa, synthetic construct
  source 1..9: note = Seed: LVVVGAGDV (KRAS G13D)
WVVMGGGDI

SEQ ID NO: 80954 - protein, 9 aa, synthetic construct
  source 1..9: note = Seed: LVVVGAGDV (KRAS G13D)
WVVMGGGDL

SEQ ID NO: 80955 - protein, 9 aa, synthetic construct
  source 1..9: note = Seed: LVVVGAGDV (KRAS G13D)
WVVMGGGDM

SEQ ID NO: 80956 - protein, 9 aa, synthetic construct
  source 1..9: note = Seed: LVVVGAGDV (KRAS G13D)
WVVMGGGDN

SEQ ID NO: 80957 - protein, 9 aa, synthetic construct
  source 1..9: note = Seed: LVVVGAGDV (KRAS G13D)
WVVMGGGDS

SEQ ID NO: 80958 - protein, 9 aa, synthetic construct
  source 1..9: note = Seed: LVVVGAGDV (KRAS G13D)
WVVMGGGDT

SEQ ID NO: 80959 - protein, 9 aa, synthetic construct
  source 1..9: note = Seed: LVVVGAGDV (KRAS G13D)
WVVMGGGDV

SEQ ID NO: 80960 - protein, 9 aa, synthetic construct
  source 1..9: note = Seed: LVVVGAGDV (KRAS G13D)
WVVMGHGDL

SEQ ID NO: 80961 - protein, 9 aa, synthetic construct
  source 1..9: note = Seed: LVVVGAGDV (KRAS G13D)
WVVMGIGDA

SEQ ID NO: 80962 - protein, 9 aa, synthetic construct
  source 1..9: note = Seed: LVVVGAGDV (KRAS G13D)
WVVMGIGDI

SEQ ID NO: 80963 - protein, 9 aa, synthetic construct
  source 1..9: note = Seed: LVVVGAGDV (KRAS G13D)
WVVMGIGDL

SEQ ID NO: 80964 - protein, 9 aa, synthetic construct
  source 1..9: note = Seed: LVVVGAGDV (KRAS G13D)
WVVMGIGDM

SEQ ID NO: 80965 - protein, 9 aa, synthetic construct
  source 1..9: note = Seed: LVVVGAGDV (KRAS G13D)
WVVMGIGDN

SEQ ID NO: 80966 - protein, 9 aa, synthetic construct
  source 1..9: note = Seed: LVVVGAGDV (KRAS G13D)
WVVMGIGDS

SEQ ID NO: 80967 - protein, 9 aa, synthetic construct
  source 1..9: note = Seed: LVVVGAGDV (KRAS G13D)
WVVMGIGDT

SEQ ID NO: 80968 - protein, 9 aa, synthetic construct
  source 1..9: note = Seed: LVVVGAGDV (KRAS G13D)
WVVMGIGDV

SEQ ID NO: 80969 - protein, 9 aa, synthetic construct
  source 1..9: note = Seed: LVVVGAGDV (KRAS G13D)
WVVMGKGDA

SEQ ID NO: 80970 - protein, 9 aa, synthetic construct
  source 1..9: note = Seed: LVVVGAGDV (KRAS G13D)
WVVMGKGDH

SEQ ID NO: 80971 - protein, 9 aa, synthetic construct
  source 1..9: note = Seed: LVVVGAGDV (KRAS G13D)
WVVMGKGDS

SEQ ID NO: 80972 - protein, 9 aa, synthetic construct
  source 1..9: note = Seed: LVVVGAGDV (KRAS G13D)
WVVMGKGDT

SEQ ID NO: 80973 - protein, 9 aa, synthetic construct
  source 1..9: note = Seed: LVVVGAGDV (KRAS G13D)
WVVMGLGDA

SEQ ID NO: 80974 - protein, 9 aa, synthetic construct
  source 1..9: note = Seed: LVVVGAGDV (KRAS G13D)
WVVMGLGDL

SEQ ID NO: 80975 - protein, 9 aa, synthetic construct
  source 1..9: note = Seed: LVVVGAGDV (KRAS G13D)
WVVMGLGDM

SEQ ID NO: 80976 - protein, 9 aa, synthetic construct
  source 1..9: note = Seed: LVVVGAGDV (KRAS G13D)
WVVMGMGDI

SEQ ID NO: 80977 - protein, 9 aa, synthetic construct
  source 1..9: note = Seed: LVVVGAGDV (KRAS G13D)
WVVMGMGDL

SEQ ID NO: 80978 - protein, 9 aa, synthetic construct
  source 1..9: note = Seed: LVVVGAGDV (KRAS G13D)
WVVMGMGDM

SEQ ID NO: 80979 - protein, 9 aa, synthetic construct
  source 1..9: note = Seed: LVVVGAGDV (KRAS G13D)
WVVMGNGDA

SEQ ID NO: 80980 - protein, 9 aa, synthetic construct
  source 1..9: note = Seed: LVVVGAGDV (KRAS G13D)
WVVMGNGDG

SEQ ID NO: 80981 - protein, 9 aa, synthetic construct
  source 1..9: note = Seed: LVVVGAGDV (KRAS G13D)
WVVMGNGDI

SEQ ID NO: 80982 - protein, 9 aa, synthetic construct
  source 1..9: note = Seed: LVVVGAGDV (KRAS G13D)
WVVMGNGDL

SEQ ID NO: 80983 - protein, 9 aa, synthetic construct
  source 1..9: note = Seed: LVVVGAGDV (KRAS G13D)
WVVMGNGDM

SEQ ID NO: 80984 - protein, 9 aa, synthetic construct
  source 1..9: note = Seed: LVVVGAGDV (KRAS G13D)
WVVMGNGDS

SEQ ID NO: 80985 - protein, 9 aa, synthetic construct
  source 1..9: note = Seed: LVVVGAGDV (KRAS G13D)
WVVMGNGDT

SEQ ID NO: 80986 - protein, 9 aa, synthetic construct
  source 1..9: note = Seed: LVVVGAGDV (KRAS G13D)
WVVMGNGDV

SEQ ID NO: 80987 - protein, 9 aa, synthetic construct
  source 1..9: note = Seed: LVVVGAGDV (KRAS G13D)
WVVMGPGDA

SEQ ID NO: 80988 - protein, 9 aa, synthetic construct
  source 1..9: note = Seed: LVVVGAGDV (KRAS G13D)
WVVMGPGDI

SEQ ID NO: 80989 - protein, 9 aa, synthetic construct
  source 1..9: note = Seed: LVVVGAGDV (KRAS G13D)
WVVMGPGDL

SEQ ID NO: 80990 - protein, 9 aa, synthetic construct
  source 1..9: note = Seed: LVVVGAGDV (KRAS G13D)
WVVMGPGDM

SEQ ID NO: 80991 - protein, 9 aa, synthetic construct
  source 1..9: note = Seed: LVVVGAGDV (KRAS G13D)
WVVMGPGDN

SEQ ID NO: 80992 - protein, 9 aa, synthetic construct
  source 1..9: note = Seed: LVVVGAGDV (KRAS G13D)
WVVMGPGDS

SEQ ID NO: 80993 - protein, 9 aa, synthetic construct
  source 1..9: note = Seed: LVVVGAGDV (KRAS G13D)
WVVMGPGDT

SEQ ID NO: 80994 - protein, 9 aa, synthetic construct
  source 1..9: note = Seed: LVVVGAGDV (KRAS G13D)
WVVMGPGDV

SEQ ID NO: 80995 - protein, 9 aa, synthetic construct
  source 1..9: note = Seed: LVVVGAGDV (KRAS G13D)
WVVMGQGDL

SEQ ID NO: 80996 - protein, 9 aa, synthetic construct
  source 1..9: note = Seed: LVVVGAGDV (KRAS G13D)
WVVMGRGDA

SEQ ID NO: 80997 - protein, 9 aa, synthetic construct
  source 1..9: note = Seed: LVVVGAGDV (KRAS G13D)
WVVMGRGDG

SEQ ID NO: 80998 - protein, 9 aa, synthetic construct
  source 1..9: note = Seed: LVVVGAGDV (KRAS G13D)
WVVMGRGDH

SEQ ID NO: 80999 - protein, 9 aa, synthetic construct
  source 1..9: note = Seed: LVVVGAGDV (KRAS G13D)
WVVMGRGDM

SEQ ID NO: 81000 - protein, 9 aa, synthetic construct
  source 1..9: note = Seed: LVVVGAGDV (KRAS G13D)
WVVMGRGDN

SEQ ID NO: 81001 - protein, 9 aa, synthetic construct
  source 1..9: note = Seed: LVVVGAGDV (KRAS G13D)
WVVMGRGDQ

SEQ ID NO: 81002 - protein, 9 aa, synthetic construct
  source 1..9: note = Seed: LVVVGAGDV (KRAS G13D)
WVVMGRGDS

SEQ ID NO: 81003 - protein, 9 aa, synthetic construct
  source 1..9: note = Seed: LVVVGAGDV (KRAS G13D)
WVVMGRGDT

SEQ ID NO: 81004 - protein, 9 aa, synthetic construct
  source 1..9: note = Seed: LVVVGAGDV (KRAS G13D)
WVVMGRGDV

SEQ ID NO: 81005 - protein, 9 aa, synthetic construct
  source 1..9: note = Seed: LVVVGAGDV (KRAS G13D)
WVVMGSGDA

SEQ ID NO: 81006 - protein, 9 aa, synthetic construct
  source 1..9: note = Seed: LVVVGAGDV (KRAS G13D)
WVVMGSGDC

SEQ ID NO: 81007 - protein, 9 aa, synthetic construct
  source 1..9: note = Seed: LVVVGAGDV (KRAS G13D)
WVVMGSGDF

SEQ ID NO: 81008 - protein, 9 aa, synthetic construct
  source 1..9: note = Seed: LVVVGAGDV (KRAS G13D)
WVVMGSGDG

SEQ ID NO: 81009 - protein, 9 aa, synthetic construct
  source 1..9: note = Seed: LVVVGAGDV (KRAS G13D)
WVVMGSGDI

SEQ ID NO: 81010 - protein, 9 aa, synthetic construct
  source 1..9: note = Seed: LVVVGAGDV (KRAS G13D)
WVVMGSGDL

SEQ ID NO: 81011 - protein, 9 aa, synthetic construct
  source 1..9: note = Seed: LVVVGAGDV (KRAS G13D)
WVVMGSGDM

SEQ ID NO: 81012 - protein, 9 aa, synthetic construct
  source 1..9: note = Seed: LVVVGAGDV (KRAS G13D)
WVVMGSGDN

SEQ ID NO: 81013 - protein, 9 aa, synthetic construct
  source 1..9: note = Seed: LVVVGAGDV (KRAS G13D)
WVVMGSGDS

SEQ ID NO: 81014 - protein, 9 aa, synthetic construct
  source 1..9: note = Seed: LVVVGAGDV (KRAS G13D)
WVVMGSGDT

SEQ ID NO: 81015 - protein, 9 aa, synthetic construct
  source 1..9: note = Seed: LVVVGAGDV (KRAS G13D)
WVVMGSGDV

SEQ ID NO: 81016 - protein, 9 aa, synthetic construct
  source 1..9: note = Seed: LVVVGAGDV (KRAS G13D)
WVVMGTGDA

SEQ ID NO: 81017 - protein, 9 aa, synthetic construct
  source 1..9: note = Seed: LVVVGAGDV (KRAS G13D)
WVVMGTGDI

SEQ ID NO: 81018 - protein, 9 aa, synthetic construct
  source 1..9: note = Seed: LVVVGAGDV (KRAS G13D)
WVVMGTGDL

SEQ ID NO: 81019 - protein, 9 aa, synthetic construct
  source 1..9: note = Seed: LVVVGAGDV (KRAS G13D)
WVVMGTGDM

SEQ ID NO: 81020 - protein, 9 aa, synthetic construct
  source 1..9: note = Seed: LVVVGAGDV (KRAS G13D)
WVVMGTGDN

SEQ ID NO: 81021 - protein, 9 aa, synthetic construct
  source 1..9: note = Seed: LVVVGAGDV (KRAS G13D)
WVVMGTGDS

SEQ ID NO: 81022 - protein, 9 aa, synthetic construct
  source 1..9: note = Seed: LVVVGAGDV (KRAS G13D)
WVVMGTGDT

SEQ ID NO: 81023 - protein, 9 aa, synthetic construct
  source 1..9: note = Seed: LVVVGAGDV (KRAS G13D)
WVVMGTGDV

SEQ ID NO: 81024 - protein, 9 aa, synthetic construct
  source 1..9: note = Seed: LVVVGAGDV (KRAS G13D)
WVVMGVGDA

SEQ ID NO: 81025 - protein, 9 aa, synthetic construct
  source 1..9: note = Seed: LVVVGAGDV (KRAS G13D)
WVVMGVGDI

SEQ ID NO: 81026 - protein, 9 aa, synthetic construct
  source 1..9: note = Seed: LVVVGAGDV (KRAS G13D)
WVVMGVGDL

SEQ ID NO: 81027 - protein, 9 aa, synthetic construct
  source 1..9: note = Seed: LVVVGAGDV (KRAS G13D)
WVVMGVGDM

SEQ ID NO: 81028 - protein, 9 aa, synthetic construct
  source 1..9: note = Seed: LVVVGAGDV (KRAS G13D)
WVVMGVGDN

SEQ ID NO: 81029 - protein, 9 aa, synthetic construct
  source 1..9: note = Seed: LVVVGAGDV (KRAS G13D)
WVVMGVGDS

SEQ ID NO: 81030 - protein, 9 aa, synthetic construct
  source 1..9: note = Seed: LVVVGAGDV (KRAS G13D)
WVVMGVGDT

SEQ ID NO: 81031 - protein, 9 aa, synthetic construct
  source 1..9: note = Seed: LVVVGAGDV (KRAS G13D)
WVVMGVGDV

SEQ ID NO: 81032 - protein, 9 aa, synthetic construct
  source 1..9: note = Seed: LVVVGAGDV (KRAS G13D)
WVVNGAGDF

SEQ ID NO: 81033 - protein, 9 aa, synthetic construct
  source 1..9: note = Seed: LVVVGAGDV (KRAS G13D)
WVVNGAGDI

SEQ ID NO: 81034 - protein, 9 aa, synthetic construct
  source 1..9: note = Seed: LVVVGAGDV (KRAS G13D)
WVVNGAGDL

SEQ ID NO: 81035 - protein, 9 aa, synthetic construct
  source 1..9: note = Seed: LVVVGAGDV (KRAS G13D)
WVVNGAGDM

SEQ ID NO: 81036 - protein, 9 aa, synthetic construct
  source 1..9: note = Seed: LVVVGAGDV (KRAS G13D)
WVVNGAGDV

SEQ ID NO: 81037 - protein, 9 aa, synthetic construct
  source 1..9: note = Seed: LVVVGAGDV (KRAS G13D)
WVVNGAGDY

SEQ ID NO: 81038 - protein, 9 aa, synthetic construct
  source 1..9: note = Seed: LVVVGAGDV (KRAS G13D)
WVVNGGGDI

SEQ ID NO: 81039 - protein, 9 aa, synthetic construct
  source 1..9: note = Seed: LVVVGAGDV (KRAS G13D)
WVVNGIGDF

SEQ ID NO: 81040 - protein, 9 aa, synthetic construct
  source 1..9: note = Seed: LVVVGAGDV (KRAS G13D)
WVVNGIGDI

SEQ ID NO: 81041 - protein, 9 aa, synthetic construct
  source 1..9: note = Seed: LVVVGAGDV (KRAS G13D)
WVVNGIGDL

SEQ ID NO: 81042 - protein, 9 aa, synthetic construct
  source 1..9: note = Seed: LVVVGAGDV (KRAS G13D)
WVVNGIGDV

SEQ ID NO: 81043 - protein, 9 aa, synthetic construct
  source 1..9: note = Seed: LVVVGAGDV (KRAS G13D)
WVVNGNGDF

SEQ ID NO: 81044 - protein, 9 aa, synthetic construct
  source 1..9: note = Seed: LVVVGAGDV (KRAS G13D)
WVVNGNGDI

SEQ ID NO: 81045 - protein, 9 aa, synthetic construct
  source 1..9: note = Seed: LVVVGAGDV (KRAS G13D)
WVVNGNGDL

SEQ ID NO: 81046 - protein, 9 aa, synthetic construct
  source 1..9: note = Seed: LVVVGAGDV (KRAS G13D)
WVVNGNGDM

SEQ ID NO: 81047 - protein, 9 aa, synthetic construct
  source 1..9: note = Seed: LVVVGAGDV (KRAS G13D)
WVVNGNGDV

SEQ ID NO: 81048 - protein, 9 aa, synthetic construct
  source 1..9: note = Seed: LVVVGAGDV (KRAS G13D)
WVVNGNGDY

SEQ ID NO: 81049 - protein, 9 aa, synthetic construct
  source 1..9: note = Seed: LVVVGAGDV (KRAS G13D)
WVVNGSGDF

SEQ ID NO: 81050 - protein, 9 aa, synthetic construct
  source 1..9: note = Seed: LVVVGAGDV (KRAS G13D)
WVVNGSGDI

SEQ ID NO: 81051 - protein, 9 aa, synthetic construct
  source 1..9: note = Seed: LVVVGAGDV (KRAS G13D)
WVVNGSGDL

SEQ ID NO: 81052 - protein, 9 aa, synthetic construct
  source 1..9: note = Seed: LVVVGAGDV (KRAS G13D)
WVVNGSGDM

SEQ ID NO: 81053 - protein, 9 aa, synthetic construct
  source 1..9: note = Seed: LVVVGAGDV (KRAS G13D)
WVVNGSGDV

SEQ ID NO: 81054 - protein, 9 aa, synthetic construct
  source 1..9: note = Seed: LVVVGAGDV (KRAS G13D)
WVVNGTGDI

SEQ ID NO: 81055 - protein, 9 aa, synthetic construct
  source 1..9: note = Seed: LVVVGAGDV (KRAS G13D)
WVVNGTGDL

SEQ ID NO: 81056 - protein, 9 aa, synthetic construct
  source 1..9: note = Seed: LVVVGAGDV (KRAS G13D)
WVVNGTGDV

SEQ ID NO: 81057 - protein, 9 aa, synthetic construct
  source 1..9: note = Seed: LVVVGAGDV (KRAS G13D)
WVVNGVGDF

SEQ ID NO: 81058 - protein, 9 aa, synthetic construct
  source 1..9: note = Seed: LVVVGAGDV (KRAS G13D)
WVVNGVGDI

SEQ ID NO: 81059 - protein, 9 aa, synthetic construct
  source 1..9: note = Seed: LVVVGAGDV (KRAS G13D)
WVVNGVGDL

SEQ ID NO: 81060 - protein, 9 aa, synthetic construct
  source 1..9: note = Seed: LVVVGAGDV (KRAS G13D)
WVVNGVGDV

SEQ ID NO: 81061 - protein, 9 aa, synthetic construct
  source 1..9: note = Seed: LVVVGAGDV (KRAS G13D)
WVVQGAGDA

SEQ ID NO: 81062 - protein, 9 aa, synthetic construct
  source 1..9: note = Seed: LVVVGAGDV (KRAS G13D)
WVVQGAGDI

SEQ ID NO: 81063 - protein, 9 aa, synthetic construct
  source 1..9: note = Seed: LVVVGAGDV (KRAS G13D)
WVVQGAGDL

SEQ ID NO: 81064 - protein, 9 aa, synthetic construct
  source 1..9: note = Seed: LVVVGAGDV (KRAS G13D)
WVVQGAGDM

SEQ ID NO: 81065 - protein, 9 aa, synthetic construct
  source 1..9: note = Seed: LVVVGAGDV (KRAS G13D)
WVVQGAGDS

SEQ ID NO: 81066 - protein, 9 aa, synthetic construct
  source 1..9: note = Seed: LVVVGAGDV (KRAS G13D)
WVVQGAGDT

SEQ ID NO: 81067 - protein, 9 aa, synthetic construct
  source 1..9: note = Seed: LVVVGAGDV (KRAS G13D)
WVVQGAGDV

SEQ ID NO: 81068 - protein, 9 aa, synthetic construct
  source 1..9: note = Seed: LVVVGAGDV (KRAS G13D)
WVVQGGGDA

SEQ ID NO: 81069 - protein, 9 aa, synthetic construct
  source 1..9: note = Seed: LVVVGAGDV (KRAS G13D)
WVVQGGGDI

SEQ ID NO: 81070 - protein, 9 aa, synthetic construct
  source 1..9: note = Seed: LVVVGAGDV (KRAS G13D)
WVVQGGGDL

SEQ ID NO: 81071 - protein, 9 aa, synthetic construct
  source 1..9: note = Seed: LVVVGAGDV (KRAS G13D)
WVVQGGGDV

SEQ ID NO: 81072 - protein, 9 aa, synthetic construct
  source 1..9: note = Seed: LVVVGAGDV (KRAS G13D)
WVVQGNGDA

SEQ ID NO: 81073 - protein, 9 aa, synthetic construct
  source 1..9: note = Seed: LVVVGAGDV (KRAS G13D)
WVVQGNGDI

SEQ ID NO: 81074 - protein, 9 aa, synthetic construct
  source 1..9: note = Seed: LVVVGAGDV (KRAS G13D)
WVVQGNGDL

SEQ ID NO: 81075 - protein, 9 aa, synthetic construct
  source 1..9: note = Seed: LVVVGAGDV (KRAS G13D)
WVVQGNGDV

SEQ ID NO: 81076 - protein, 9 aa, synthetic construct
  source 1..9: note = Seed: LVVVGAGDV (KRAS G13D)
WVVQGPGDL

SEQ ID NO: 81077 - protein, 9 aa, synthetic construct
  source 1..9: note = Seed: LVVVGAGDV (KRAS G13D)
WVVQGSGDA

SEQ ID NO: 81078 - protein, 9 aa, synthetic construct
  source 1..9: note = Seed: LVVVGAGDV (KRAS G13D)
WVVQGSGDI

SEQ ID NO: 81079 - protein, 9 aa, synthetic construct
  source 1..9: note = Seed: LVVVGAGDV (KRAS G13D)
WVVQGSGDL

SEQ ID NO: 81080 - protein, 9 aa, synthetic construct
  source 1..9: note = Seed: LVVVGAGDV (KRAS G13D)
WVVQGSGDM

SEQ ID NO: 81081 - protein, 9 aa, synthetic construct
  source 1..9: note = Seed: LVVVGAGDV (KRAS G13D)
WVVQGSGDV

SEQ ID NO: 81082 - protein, 9 aa, synthetic construct
  source 1..9: note = Seed: LVVVGAGDV (KRAS G13D)
WVVQGTGDL

SEQ ID NO: 81083 - protein, 9 aa, synthetic construct
  source 1..9: note = Seed: LVVVGAGDV (KRAS G13D)
WVVQGTGDV

SEQ ID NO: 81084 - protein, 9 aa, synthetic construct
  source 1..9: note = Seed: LVVVGAGDV (KRAS G13D)
WVVSGAGDA

SEQ ID NO: 81085 - protein, 9 aa, synthetic construct
  source 1..9: note = Seed: LVVVGAGDV (KRAS G13D)
WVVSGAGDI

SEQ ID NO: 81086 - protein, 9 aa, synthetic construct
  source 1..9: note = Seed: LVVVGAGDV (KRAS G13D)
WVVSGAGDL

SEQ ID NO: 81087 - protein, 9 aa, synthetic construct
  source 1..9: note = Seed: LVVVGAGDV (KRAS G13D)
WVVSGAGDM

SEQ ID NO: 81088 - protein, 9 aa, synthetic construct
  source 1..9: note = Seed: LVVVGAGDV (KRAS G13D)
WVVSGAGDV

SEQ ID NO: 81089 - protein, 9 aa, synthetic construct
  source 1..9: note = Seed: LVVVGAGDV (KRAS G13D)
WVVSGFGDI

SEQ ID NO: 81090 - protein, 9 aa, synthetic construct
  source 1..9: note = Seed: LVVVGAGDV (KRAS G13D)
WVVSGFGDL

SEQ ID NO: 81091 - protein, 9 aa, synthetic construct
  source 1..9: note = Seed: LVVVGAGDV (KRAS G13D)
WVVSGFGDV

SEQ ID NO: 81092 - protein, 9 aa, synthetic construct
  source 1..9: note = Seed: LVVVGAGDV (KRAS G13D)
WVVSGGGDA

SEQ ID NO: 81093 - protein, 9 aa, synthetic construct
  source 1..9: note = Seed: LVVVGAGDV (KRAS G13D)
WVVSGGGDI

SEQ ID NO: 81094 - protein, 9 aa, synthetic construct
  source 1..9: note = Seed: LVVVGAGDV (KRAS G13D)
WVVSGGGDL

SEQ ID NO: 81095 - protein, 9 aa, synthetic construct
  source 1..9: note = Seed: LVVVGAGDV (KRAS G13D)
WVVSGGGDV

SEQ ID NO: 81096 - protein, 9 aa, synthetic construct
  source 1..9: note = Seed: LVVVGAGDV (KRAS G13D)
WVVSGNGDL

SEQ ID NO: 81097 - protein, 9 aa, synthetic construct
  source 1..9: note = Seed: LVVVGAGDV (KRAS G13D)
WVVSGPGDL

SEQ ID NO: 81098 - protein, 9 aa, synthetic construct
  source 1..9: note = Seed: LVVVGAGDV (KRAS G13D)
WVVSGPGDV

SEQ ID NO: 81099 - protein, 9 aa, synthetic construct
  source 1..9: note = Seed: LVVVGAGDV (KRAS G13D)
WVVSGSGDA

SEQ ID NO: 81100 - protein, 9 aa, synthetic construct
  source 1..9: note = Seed: LVVVGAGDV (KRAS G13D)
WVVSGSGDI

SEQ ID NO: 81101 - protein, 9 aa, synthetic construct
  source 1..9: note = Seed: LVVVGAGDV (KRAS G13D)
WVVSGSGDL

SEQ ID NO: 81102 - protein, 9 aa, synthetic construct
  source 1..9: note = Seed: LVVVGAGDV (KRAS G13D)
WVVSGSGDV

SEQ ID NO: 81103 - protein, 9 aa, synthetic construct
  source 1..9: note = Seed: LVVVGAGDV (KRAS G13D)
WVVTGAGDA

SEQ ID NO: 81104 - protein, 9 aa, synthetic construct
  source 1..9: note = Seed: LVVVGAGDV (KRAS G13D)
WVVTGAGDI

SEQ ID NO: 81105 - protein, 9 aa, synthetic construct
  source 1..9: note = Seed: LVVVGAGDV (KRAS G13D)
WVVTGAGDL

SEQ ID NO: 81106 - protein, 9 aa, synthetic construct
  source 1..9: note = Seed: LVVVGAGDV (KRAS G13D)
WVVTGAGDV

SEQ ID NO: 81107 - protein, 9 aa, synthetic construct
  source 1..9: note = Seed: LVVVGAGDV (KRAS G13D)
WVVTGFGDI

SEQ ID NO: 81108 - protein, 9 aa, synthetic construct
  source 1..9: note = Seed: LVVVGAGDV (KRAS G13D)
WVVTGFGDL

SEQ ID NO: 81109 - protein, 9 aa, synthetic construct
  source 1..9: note = Seed: LVVVGAGDV (KRAS G13D)
WVVTGFGDV

SEQ ID NO: 81110 - protein, 9 aa, synthetic construct
  source 1..9: note = Seed: LVVVGAGDV (KRAS G13D)
WVVTGSGDI

SEQ ID NO: 81111 - protein, 9 aa, synthetic construct
  source 1..9: note = Seed: LVVVGAGDV (KRAS G13D)
WVVTGSGDL

SEQ ID NO: 81112 - protein, 9 aa, synthetic construct
  source 1..9: note = Seed: LVVVGAGDV (KRAS G13D)
WVVTGSGDV

SEQ ID NO: 81113 - protein, 9 aa, synthetic construct
  source 1..9: note = Seed: LVVVGAGDV (KRAS G13D)
WVVVGAGDA

SEQ ID NO: 81114 - protein, 9 aa, synthetic construct
  source 1..9: note = Seed: LVVVGAGDV (KRAS G13D)
WVVVGAGDI

SEQ ID NO: 81115 - protein, 9 aa, synthetic construct
  source 1..9: note = Seed: LVVVGAGDV (KRAS G13D)
WVVVGAGDL

SEQ ID NO: 81116 - protein, 9 aa, synthetic construct
  source 1..9: note = Seed: LVVVGAGDV (KRAS G13D)
WVVVGAGDM

SEQ ID NO: 81117 - protein, 9 aa, synthetic construct
  source 1..9: note = Seed: LVVVGAGDV (KRAS G13D)
WVVVGAGDS

SEQ ID NO: 81118 - protein, 9 aa, synthetic construct
  source 1..9: note = Seed: LVVVGAGDV (KRAS G13D)
WVVVGAGDT

SEQ ID NO: 81119 - protein, 9 aa, synthetic construct
  source 1..9: note = Seed: LVVVGAGDV (KRAS G13D)
WVVVGAGDV

SEQ ID NO: 81120 - protein, 9 aa, synthetic construct
  source 1..9: note = Seed: LVVVGAGDV (KRAS G13D)
WVVVGGGDA

SEQ ID NO: 81121 - protein, 9 aa, synthetic construct
  source 1..9: note = Seed: LVVVGAGDV (KRAS G13D)
WVVVGGGDI

SEQ ID NO: 81122 - protein, 9 aa, synthetic construct
  source 1..9: note = Seed: LVVVGAGDV (KRAS G13D)
WVVVGGGDL

SEQ ID NO: 81123 - protein, 9 aa, synthetic construct
  source 1..9: note = Seed: LVVVGAGDV (KRAS G13D)
WVVVGGGDM

SEQ ID NO: 81124 - protein, 9 aa, synthetic construct
  source 1..9: note = Seed: LVVVGAGDV (KRAS G13D)
WVVVGGGDT

SEQ ID NO: 81125 - protein, 9 aa, synthetic construct
  source 1..9: note = Seed: LVVVGAGDV (KRAS G13D)
WVVVGGGDV

SEQ ID NO: 81126 - protein, 9 aa, synthetic construct
  source 1..9: note = Seed: LVVVGAGDV (KRAS G13D)
WVVVGKGDA

SEQ ID NO: 81127 - protein, 9 aa, synthetic construct
  source 1..9: note = Seed: LVVVGAGDV (KRAS G13D)
WVVVGKGDS

SEQ ID NO: 81128 - protein, 9 aa, synthetic construct
  source 1..9: note = Seed: LVVVGAGDV (KRAS G13D)
WVVVGNGDA

SEQ ID NO: 81129 - protein, 9 aa, synthetic construct
  source 1..9: note = Seed: LVVVGAGDV (KRAS G13D)
WVVVGNGDI

SEQ ID NO: 81130 - protein, 9 aa, synthetic construct
  source 1..9: note = Seed: LVVVGAGDV (KRAS G13D)
WVVVGNGDL

SEQ ID NO: 81131 - protein, 9 aa, synthetic construct
  source 1..9: note = Seed: LVVVGAGDV (KRAS G13D)
WVVVGNGDV

SEQ ID NO: 81132 - protein, 9 aa, synthetic construct
  source 1..9: note = Seed: LVVVGAGDV (KRAS G13D)
WVVVGPGDA

SEQ ID NO: 81133 - protein, 9 aa, synthetic construct
  source 1..9: note = Seed: LVVVGAGDV (KRAS G13D)
WVVVGPGDI

SEQ ID NO: 81134 - protein, 9 aa, synthetic construct
  source 1..9: note = Seed: LVVVGAGDV (KRAS G13D)
WVVVGPGDL

SEQ ID NO: 81135 - protein, 9 aa, synthetic construct
  source 1..9: note = Seed: LVVVGAGDV (KRAS G13D)
WVVVGPGDV

SEQ ID NO: 81136 - protein, 9 aa, synthetic construct
  source 1..9: note = Seed: LVVVGAGDV (KRAS G13D)
WVVVGRGDA

SEQ ID NO: 81137 - protein, 9 aa, synthetic construct
  source 1..9: note = Seed: LVVVGAGDV (KRAS G13D)
WVVVGRGDH

SEQ ID NO: 81138 - protein, 9 aa, synthetic construct
  source 1..9: note = Seed: LVVVGAGDV (KRAS G13D)
WVVVGRGDQ

SEQ ID NO: 81139 - protein, 9 aa, synthetic construct
  source 1..9: note = Seed: LVVVGAGDV (KRAS G13D)
WVVVGRGDS

SEQ ID NO: 81140 - protein, 9 aa, synthetic construct
  source 1..9: note = Seed: LVVVGAGDV (KRAS G13D)
WVVVGRGDT

SEQ ID NO: 81141 - protein, 9 aa, synthetic construct
  source 1..9: note = Seed: LVVVGAGDV (KRAS G13D)
WVVVGSGDA

SEQ ID NO: 81142 - protein, 9 aa, synthetic construct
  source 1..9: note = Seed: LVVVGAGDV (KRAS G13D)
WVVVGSGDI

SEQ ID NO: 81143 - protein, 9 aa, synthetic construct
  source 1..9: note = Seed: LVVVGAGDV (KRAS G13D)
WVVVGSGDL

SEQ ID NO: 81144 - protein, 9 aa, synthetic construct
  source 1..9: note = Seed: LVVVGAGDV (KRAS G13D)
WVVVGSGDM

SEQ ID NO: 81145 - protein, 9 aa, synthetic construct
  source 1..9: note = Seed: LVVVGAGDV (KRAS G13D)
WVVVGSGDT

SEQ ID NO: 81146 - protein, 9 aa, synthetic construct
  source 1..9: note = Seed: LVVVGAGDV (KRAS G13D)
WVVVGSGDV

SEQ ID NO: 81147 - protein, 9 aa, synthetic construct
  source 1..9: note = Seed: LVVVGAGDV (KRAS G13D)
WVVVGTGDI

SEQ ID NO: 81148 - protein, 9 aa, synthetic construct
  source 1..9: note = Seed: LVVVGAGDV (KRAS G13D)
WVVVGTGDL

SEQ ID NO: 81149 - protein, 9 aa, synthetic construct
  source 1..9: note = Seed: LVVVGAGDV (KRAS G13D)
WVVVGTGDV

SEQ ID NO: 81150 - protein, 9 aa, synthetic construct
  source 1..9: note = Seed: LVVVGAGDV (KRAS G13D)
WVVVGVGDA

SEQ ID NO: 81151 - protein, 9 aa, synthetic construct
  source 1..9: note = Seed: LVVVGAGDV (KRAS G13D)
YVVAGAGDA

SEQ ID NO: 81152 - protein, 9 aa, synthetic construct
  source 1..9: note = Seed: LVVVGAGDV (KRAS G13D)
YVVAGAGDC

SEQ ID NO: 81153 - protein, 9 aa, synthetic construct
  source 1..9: note = Seed: LVVVGAGDV (KRAS G13D)
YVVAGAGDF

SEQ ID NO: 81154 - protein, 9 aa, synthetic construct
  source 1..9: note = Seed: LVVVGAGDV (KRAS G13D)
YVVAGAGDG

SEQ ID NO: 81155 - protein, 9 aa, synthetic construct
  source 1..9: note = Seed: LVVVGAGDV (KRAS G13D)
YVVAGAGDH

SEQ ID NO: 81156 - protein, 9 aa, synthetic construct
  source 1..9: note = Seed: LVVVGAGDV (KRAS G13D)
YVVAGAGDI

SEQ ID NO: 81157 - protein, 9 aa, synthetic construct
  source 1..9: note = Seed: LVVVGAGDV (KRAS G13D)
YVVAGAGDL

SEQ ID NO: 81158 - protein, 9 aa, synthetic construct
  source 1..9: note = Seed: LVVVGAGDV (KRAS G13D)
YVVAGAGDM

SEQ ID NO: 81159 - protein, 9 aa, synthetic construct
  source 1..9: note = Seed: LVVVGAGDV (KRAS G13D)
YVVAGAGDN

SEQ ID NO: 81160 - protein, 9 aa, synthetic construct
  source 1..9: note = Seed: LVVVGAGDV (KRAS G13D)
YVVAGAGDP

SEQ ID NO: 81161 - protein, 9 aa, synthetic construct
  source 1..9: note = Seed: LVVVGAGDV (KRAS G13D)
YVVAGAGDQ

SEQ ID NO: 81162 - protein, 9 aa, synthetic construct
  source 1..9: note = Seed: LVVVGAGDV (KRAS G13D)
YVVAGAGDR

SEQ ID NO: 81163 - protein, 9 aa, synthetic construct
  source 1..9: note = Seed: LVVVGAGDV (KRAS G13D)
YVVAGAGDS

SEQ ID NO: 81164 - protein, 9 aa, synthetic construct
  source 1..9: note = Seed: LVVVGAGDV (KRAS G13D)
YVVAGAGDT

SEQ ID NO: 81165 - protein, 9 aa, synthetic construct
  source 1..9: note = Seed: LVVVGAGDV (KRAS G13D)
YVVAGAGDV

SEQ ID NO: 81166 - protein, 9 aa, synthetic construct
  source 1..9: note = Seed: LVVVGAGDV (KRAS G13D)
YVVAGAGDW

SEQ ID NO: 81167 - protein, 9 aa, synthetic construct
  source 1..9: note = Seed: LVVVGAGDV (KRAS G13D)
YVVAGAGDY

SEQ ID NO: 81168 - protein, 9 aa, synthetic construct
  source 1..9: note = Seed: LVVVGAGDV (KRAS G13D)
YVVAGCGDI

SEQ ID NO: 81169 - protein, 9 aa, synthetic construct
  source 1..9: note = Seed: LVVVGAGDV (KRAS G13D)
YVVAGCGDL

SEQ ID NO: 81170 - protein, 9 aa, synthetic construct
  source 1..9: note = Seed: LVVVGAGDV (KRAS G13D)
YVVAGCGDV

SEQ ID NO: 81171 - protein, 9 aa, synthetic construct
  source 1..9: note = Seed: LVVVGAGDV (KRAS G13D)
YVVAGFGDI

SEQ ID NO: 81172 - protein, 9 aa, synthetic construct
  source 1..9: note = Seed: LVVVGAGDV (KRAS G13D)
YVVAGFGDL

SEQ ID NO: 81173 - protein, 9 aa, synthetic construct
  source 1..9: note = Seed: LVVVGAGDV (KRAS G13D)
YVVAGFGDV

SEQ ID NO: 81174 - protein, 9 aa, synthetic construct
  source 1..9: note = Seed: LVVVGAGDV (KRAS G13D)
YVVAGGGDA

SEQ ID NO: 81175 - protein, 9 aa, synthetic construct
  source 1..9: note = Seed: LVVVGAGDV (KRAS G13D)
YVVAGGGDF

SEQ ID NO: 81176 - protein, 9 aa, synthetic construct
  source 1..9: note = Seed: LVVVGAGDV (KRAS G13D)
YVVAGGGDG

SEQ ID NO: 81177 - protein, 9 aa, synthetic construct
  source 1..9: note = Seed: LVVVGAGDV (KRAS G13D)
YVVAGGGDI

SEQ ID NO: 81178 - protein, 9 aa, synthetic construct
  source 1..9: note = Seed: LVVVGAGDV (KRAS G13D)
YVVAGGGDL

SEQ ID NO: 81179 - protein, 9 aa, synthetic construct
  source 1..9: note = Seed: LVVVGAGDV (KRAS G13D)
YVVAGGGDM

SEQ ID NO: 81180 - protein, 9 aa, synthetic construct
  source 1..9: note = Seed: LVVVGAGDV (KRAS G13D)
YVVAGGGDS

SEQ ID NO: 81181 - protein, 9 aa, synthetic construct
  source 1..9: note = Seed: LVVVGAGDV (KRAS G13D)
YVVAGGGDT

SEQ ID NO: 81182 - protein, 9 aa, synthetic construct
  source 1..9: note = Seed: LVVVGAGDV (KRAS G13D)
YVVAGGGDV

SEQ ID NO: 81183 - protein, 9 aa, synthetic construct
  source 1..9: note = Seed: LVVVGAGDV (KRAS G13D)
YVVAGHGDL

SEQ ID NO: 81184 - protein, 9 aa, synthetic construct
  source 1..9: note = Seed: LVVVGAGDV (KRAS G13D)
YVVAGIGDA

SEQ ID NO: 81185 - protein, 9 aa, synthetic construct
  source 1..9: note = Seed: LVVVGAGDV (KRAS G13D)
YVVAGIGDG

SEQ ID NO: 81186 - protein, 9 aa, synthetic construct
  source 1..9: note = Seed: LVVVGAGDV (KRAS G13D)
YVVAGIGDI

SEQ ID NO: 81187 - protein, 9 aa, synthetic construct
  source 1..9: note = Seed: LVVVGAGDV (KRAS G13D)
YVVAGIGDL

SEQ ID NO: 81188 - protein, 9 aa, synthetic construct
  source 1..9: note = Seed: LVVVGAGDV (KRAS G13D)
YVVAGIGDM

SEQ ID NO: 81189 - protein, 9 aa, synthetic construct
  source 1..9: note = Seed: LVVVGAGDV (KRAS G13D)
YVVAGIGDN

SEQ ID NO: 81190 - protein, 9 aa, synthetic construct
  source 1..9: note = Seed: LVVVGAGDV (KRAS G13D)
YVVAGIGDQ

SEQ ID NO: 81191 - protein, 9 aa, synthetic construct
  source 1..9: note = Seed: LVVVGAGDV (KRAS G13D)
YVVAGIGDS

SEQ ID NO: 81192 - protein, 9 aa, synthetic construct
  source 1..9: note = Seed: LVVVGAGDV (KRAS G13D)
YVVAGIGDT

SEQ ID NO: 81193 - protein, 9 aa, synthetic construct
  source 1..9: note = Seed: LVVVGAGDV (KRAS G13D)
YVVAGIGDV

SEQ ID NO: 81194 - protein, 9 aa, synthetic construct
  source 1..9: note = Seed: LVVVGAGDV (KRAS G13D)
YVVAGKGDA

SEQ ID NO: 81195 - protein, 9 aa, synthetic construct
  source 1..9: note = Seed: LVVVGAGDV (KRAS G13D)
YVVAGKGDS

SEQ ID NO: 81196 - protein, 9 aa, synthetic construct
  source 1..9: note = Seed: LVVVGAGDV (KRAS G13D)
YVVAGMGDC

SEQ ID NO: 81197 - protein, 9 aa, synthetic construct
  source 1..9: note = Seed: LVVVGAGDV (KRAS G13D)
YVVAGNGDA

SEQ ID NO: 81198 - protein, 9 aa, synthetic construct
  source 1..9: note = Seed: LVVVGAGDV (KRAS G13D)
YVVAGNGDF

SEQ ID NO: 81199 - protein, 9 aa, synthetic construct
  source 1..9: note = Seed: LVVVGAGDV (KRAS G13D)
YVVAGNGDG

SEQ ID NO: 81200 - protein, 9 aa, synthetic construct
  source 1..9: note = Seed: LVVVGAGDV (KRAS G13D)
YVVAGNGDI

SEQ ID NO: 81201 - protein, 9 aa, synthetic construct
  source 1..9: note = Seed: LVVVGAGDV (KRAS G13D)
YVVAGNGDL

SEQ ID NO: 81202 - protein, 9 aa, synthetic construct
  source 1..9: note = Seed: LVVVGAGDV (KRAS G13D)
YVVAGNGDM

SEQ ID NO: 81203 - protein, 9 aa, synthetic construct
  source 1..9: note = Seed: LVVVGAGDV (KRAS G13D)
YVVAGNGDN

SEQ ID NO: 81204 - protein, 9 aa, synthetic construct
  source 1..9: note = Seed: LVVVGAGDV (KRAS G13D)
YVVAGNGDS

SEQ ID NO: 81205 - protein, 9 aa, synthetic construct
  source 1..9: note = Seed: LVVVGAGDV (KRAS G13D)
YVVAGNGDT

SEQ ID NO: 81206 - protein, 9 aa, synthetic construct
  source 1..9: note = Seed: LVVVGAGDV (KRAS G13D)
YVVAGNGDV

SEQ ID NO: 81207 - protein, 9 aa, synthetic construct
  source 1..9: note = Seed: LVVVGAGDV (KRAS G13D)
YVVAGPGDA

SEQ ID NO: 81208 - protein, 9 aa, synthetic construct
  source 1..9: note = Seed: LVVVGAGDV (KRAS G13D)
YVVAGPGDG

SEQ ID NO: 81209 - protein, 9 aa, synthetic construct
  source 1..9: note = Seed: LVVVGAGDV (KRAS G13D)
YVVAGPGDI

SEQ ID NO: 81210 - protein, 9 aa, synthetic construct
  source 1..9: note = Seed: LVVVGAGDV (KRAS G13D)
YVVAGPGDL

SEQ ID NO: 81211 - protein, 9 aa, synthetic construct
  source 1..9: note = Seed: LVVVGAGDV (KRAS G13D)
YVVAGPGDM

SEQ ID NO: 81212 - protein, 9 aa, synthetic construct
  source 1..9: note = Seed: LVVVGAGDV (KRAS G13D)
YVVAGPGDN

SEQ ID NO: 81213 - protein, 9 aa, synthetic construct
  source 1..9: note = Seed: LVVVGAGDV (KRAS G13D)
YVVAGPGDQ

SEQ ID NO: 81214 - protein, 9 aa, synthetic construct
  source 1..9: note = Seed: LVVVGAGDV (KRAS G13D)
YVVAGPGDS

SEQ ID NO: 81215 - protein, 9 aa, synthetic construct
  source 1..9: note = Seed: LVVVGAGDV (KRAS G13D)
YVVAGPGDT

SEQ ID NO: 81216 - protein, 9 aa, synthetic construct
  source 1..9: note = Seed: LVVVGAGDV (KRAS G13D)
YVVAGPGDV

SEQ ID NO: 81217 - protein, 9 aa, synthetic construct
  source 1..9: note = Seed: LVVVGAGDV (KRAS G13D)
YVVAGQGDI

SEQ ID NO: 81218 - protein, 9 aa, synthetic construct
  source 1..9: note = Seed: LVVVGAGDV (KRAS G13D)
YVVAGQGDL

SEQ ID NO: 81219 - protein, 9 aa, synthetic construct
  source 1..9: note = Seed: LVVVGAGDV (KRAS G13D)
YVVAGQGDV

SEQ ID NO: 81220 - protein, 9 aa, synthetic construct
  source 1..9: note = Seed: LVVVGAGDV (KRAS G13D)
YVVAGRGDA

SEQ ID NO: 81221 - protein, 9 aa, synthetic construct
  source 1..9: note = Seed: LVVVGAGDV (KRAS G13D)
YVVAGRGDH

SEQ ID NO: 81222 - protein, 9 aa, synthetic construct
  source 1..9: note = Seed: LVVVGAGDV (KRAS G13D)
YVVAGRGDM

SEQ ID NO: 81223 - protein, 9 aa, synthetic construct
  source 1..9: note = Seed: LVVVGAGDV (KRAS G13D)
YVVAGRGDQ

SEQ ID NO: 81224 - protein, 9 aa, synthetic construct
  source 1..9: note = Seed: LVVVGAGDV (KRAS G13D)
YVVAGRGDS

SEQ ID NO: 81225 - protein, 9 aa, synthetic construct
  source 1..9: note = Seed: LVVVGAGDV (KRAS G13D)
YVVAGRGDT

SEQ ID NO: 81226 - protein, 9 aa, synthetic construct
  source 1..9: note = Seed: LVVVGAGDV (KRAS G13D)
YVVAGRGDV

SEQ ID NO: 81227 - protein, 9 aa, synthetic construct
  source 1..9: note = Seed: LVVVGAGDV (KRAS G13D)
YVVAGSGDA

SEQ ID NO: 81228 - protein, 9 aa, synthetic construct
  source 1..9: note = Seed: LVVVGAGDV (KRAS G13D)
YVVAGSGDC

SEQ ID NO: 81229 - protein, 9 aa, synthetic construct
  source 1..9: note = Seed: LVVVGAGDV (KRAS G13D)
YVVAGSGDF

SEQ ID NO: 81230 - protein, 9 aa, synthetic construct
  source 1..9: note = Seed: LVVVGAGDV (KRAS G13D)
YVVAGSGDG

SEQ ID NO: 81231 - protein, 9 aa, synthetic construct
  source 1..9: note = Seed: LVVVGAGDV (KRAS G13D)
YVVAGSGDI

SEQ ID NO: 81232 - protein, 9 aa, synthetic construct
  source 1..9: note = Seed: LVVVGAGDV (KRAS G13D)
YVVAGSGDL

SEQ ID NO: 81233 - protein, 9 aa, synthetic construct
  source 1..9: note = Seed: LVVVGAGDV (KRAS G13D)
YVVAGSGDM

SEQ ID NO: 81234 - protein, 9 aa, synthetic construct
  source 1..9: note = Seed: LVVVGAGDV (KRAS G13D)
YVVAGSGDN

SEQ ID NO: 81235 - protein, 9 aa, synthetic construct
  source 1..9: note = Seed: LVVVGAGDV (KRAS G13D)
YVVAGSGDS

SEQ ID NO: 81236 - protein, 9 aa, synthetic construct
  source 1..9: note = Seed: LVVVGAGDV (KRAS G13D)
YVVAGSGDT

SEQ ID NO: 81237 - protein, 9 aa, synthetic construct
  source 1..9: note = Seed: LVVVGAGDV (KRAS G13D)
YVVAGSGDV

SEQ ID NO: 81238 - protein, 9 aa, synthetic construct
  source 1..9: note = Seed: LVVVGAGDV (KRAS G13D)
YVVAGSGDY

SEQ ID NO: 81239 - protein, 9 aa, synthetic construct
  source 1..9: note = Seed: LVVVGAGDV (KRAS G13D)
YVVAGTGDA

SEQ ID NO: 81240 - protein, 9 aa, synthetic construct
  source 1..9: note = Seed: LVVVGAGDV (KRAS G13D)
YVVAGTGDF

SEQ ID NO: 81241 - protein, 9 aa, synthetic construct
  source 1..9: note = Seed: LVVVGAGDV (KRAS G13D)
YVVAGTGDI

SEQ ID NO: 81242 - protein, 9 aa, synthetic construct
  source 1..9: note = Seed: LVVVGAGDV (KRAS G13D)
YVVAGTGDL

SEQ ID NO: 81243 - protein, 9 aa, synthetic construct
  source 1..9: note = Seed: LVVVGAGDV (KRAS G13D)
YVVAGTGDM

SEQ ID NO: 81244 - protein, 9 aa, synthetic construct
  source 1..9: note = Seed: LVVVGAGDV (KRAS G13D)
YVVAGTGDN

SEQ ID NO: 81245 - protein, 9 aa, synthetic construct
  source 1..9: note = Seed: LVVVGAGDV (KRAS G13D)
YVVAGTGDS

SEQ ID NO: 81246 - protein, 9 aa, synthetic construct
  source 1..9: note = Seed: LVVVGAGDV (KRAS G13D)
YVVAGTGDT

SEQ ID NO: 81247 - protein, 9 aa, synthetic construct
  source 1..9: note = Seed: LVVVGAGDV (KRAS G13D)
YVVAGTGDV

SEQ ID NO: 81248 - protein, 9 aa, synthetic construct
  source 1..9: note = Seed: LVVVGAGDV (KRAS G13D)
YVVAGVGDA

SEQ ID NO: 81249 - protein, 9 aa, synthetic construct
  source 1..9: note = Seed: LVVVGAGDV (KRAS G13D)
YVVAGVGDH

SEQ ID NO: 81250 - protein, 9 aa, synthetic construct
  source 1..9: note = Seed: LVVVGAGDV (KRAS G13D)
YVVAGVGDI

SEQ ID NO: 81251 - protein, 9 aa, synthetic construct
  source 1..9: note = Seed: LVVVGAGDV (KRAS G13D)
YVVAGVGDL

SEQ ID NO: 81252 - protein, 9 aa, synthetic construct
  source 1..9: note = Seed: LVVVGAGDV (KRAS G13D)
YVVAGVGDM

SEQ ID NO: 81253 - protein, 9 aa, synthetic construct
  source 1..9: note = Seed: LVVVGAGDV (KRAS G13D)
YVVAGVGDN

SEQ ID NO: 81254 - protein, 9 aa, synthetic construct
  source 1..9: note = Seed: LVVVGAGDV (KRAS G13D)
YVVAGVGDQ

SEQ ID NO: 81255 - protein, 9 aa, synthetic construct
  source 1..9: note = Seed: LVVVGAGDV (KRAS G13D)
YVVAGVGDS

SEQ ID NO: 81256 - protein, 9 aa, synthetic construct
  source 1..9: note = Seed: LVVVGAGDV (KRAS G13D)
YVVAGVGDT

SEQ ID NO: 81257 - protein, 9 aa, synthetic construct
  source 1..9: note = Seed: LVVVGAGDV (KRAS G13D)
YVVAGVGDV

SEQ ID NO: 81258 - protein, 9 aa, synthetic construct
  source 1..9: note = Seed: LVVVGAGDV (KRAS G13D)
YVVCGAGDI

SEQ ID NO: 81259 - protein, 9 aa, synthetic construct
  source 1..9: note = Seed: LVVVGAGDV (KRAS G13D)
YVVCGAGDL

SEQ ID NO: 81260 - protein, 9 aa, synthetic construct
  source 1..9: note = Seed: LVVVGAGDV (KRAS G13D)
YVVCGAGDV

SEQ ID NO: 81261 - protein, 9 aa, synthetic construct
  source 1..9: note = Seed: LVVVGAGDV (KRAS G13D)
YVVCGSGDL

SEQ ID NO: 81262 - protein, 9 aa, synthetic construct
  source 1..9: note = Seed: LVVVGAGDV (KRAS G13D)
YVVEGAGDA

SEQ ID NO: 81263 - protein, 9 aa, synthetic construct
  source 1..9: note = Seed: LVVVGAGDV (KRAS G13D)
YVVEGAGDI

SEQ ID NO: 81264 - protein, 9 aa, synthetic construct
  source 1..9: note = Seed: LVVVGAGDV (KRAS G13D)
YVVEGAGDL

SEQ ID NO: 81265 - protein, 9 aa, synthetic construct
  source 1..9: note = Seed: LVVVGAGDV (KRAS G13D)
YVVEGAGDM

SEQ ID NO: 81266 - protein, 9 aa, synthetic construct
  source 1..9: note = Seed: LVVVGAGDV (KRAS G13D)
YVVEGAGDV

SEQ ID NO: 81267 - protein, 9 aa, synthetic construct
  source 1..9: note = Seed: LVVVGAGDV (KRAS G13D)
YVVEGFGDI

SEQ ID NO: 81268 - protein, 9 aa, synthetic construct
  source 1..9: note = Seed: LVVVGAGDV (KRAS G13D)
YVVEGFGDL

SEQ ID NO: 81269 - protein, 9 aa, synthetic construct
  source 1..9: note = Seed: LVVVGAGDV (KRAS G13D)
YVVEGFGDV

SEQ ID NO: 81270 - protein, 9 aa, synthetic construct
  source 1..9: note = Seed: LVVVGAGDV (KRAS G13D)
YVVEGGGDA

SEQ ID NO: 81271 - protein, 9 aa, synthetic construct
  source 1..9: note = Seed: LVVVGAGDV (KRAS G13D)
YVVEGGGDI

SEQ ID NO: 81272 - protein, 9 aa, synthetic construct
  source 1..9: note = Seed: LVVVGAGDV (KRAS G13D)
YVVEGGGDL

SEQ ID NO: 81273 - protein, 9 aa, synthetic construct
  source 1..9: note = Seed: LVVVGAGDV (KRAS G13D)
YVVEGGGDV

SEQ ID NO: 81274 - protein, 9 aa, synthetic construct
  source 1..9: note = Seed: LVVVGAGDV (KRAS G13D)
YVVEGNGDA

SEQ ID NO: 81275 - protein, 9 aa, synthetic construct
  source 1..9: note = Seed: LVVVGAGDV (KRAS G13D)
YVVEGNGDI

SEQ ID NO: 81276 - protein, 9 aa, synthetic construct
  source 1..9: note = Seed: LVVVGAGDV (KRAS G13D)
YVVEGNGDL

SEQ ID NO: 81277 - protein, 9 aa, synthetic construct
  source 1..9: note = Seed: LVVVGAGDV (KRAS G13D)
YVVEGNGDV

SEQ ID NO: 81278 - protein, 9 aa, synthetic construct
  source 1..9: note = Seed: LVVVGAGDV (KRAS G13D)
YVVEGPGDL

SEQ ID NO: 81279 - protein, 9 aa, synthetic construct
  source 1..9: note = Seed: LVVVGAGDV (KRAS G13D)
YVVEGSGDA

SEQ ID NO: 81280 - protein, 9 aa, synthetic construct
  source 1..9: note = Seed: LVVVGAGDV (KRAS G13D)
YVVEGSGDI

SEQ ID NO: 81281 - protein, 9 aa, synthetic construct
  source 1..9: note = Seed: LVVVGAGDV (KRAS G13D)
YVVEGSGDL

SEQ ID NO: 81282 - protein, 9 aa, synthetic construct
  source 1..9: note = Seed: LVVVGAGDV (KRAS G13D)
YVVEGSGDV

SEQ ID NO: 81283 - protein, 9 aa, synthetic construct
  source 1..9: note = Seed: LVVVGAGDV (KRAS G13D)
YVVEGTGDL

SEQ ID NO: 81284 - protein, 9 aa, synthetic construct
  source 1..9: note = Seed: LVVVGAGDV (KRAS G13D)
YVVFGAGDA

SEQ ID NO: 81285 - protein, 9 aa, synthetic construct
  source 1..9: note = Seed: LVVVGAGDV (KRAS G13D)
YVVFGAGDI

SEQ ID NO: 81286 - protein, 9 aa, synthetic construct
  source 1..9: note = Seed: LVVVGAGDV (KRAS G13D)
YVVFGAGDL

SEQ ID NO: 81287 - protein, 9 aa, synthetic construct
  source 1..9: note = Seed: LVVVGAGDV (KRAS G13D)
YVVFGAGDM

SEQ ID NO: 81288 - protein, 9 aa, synthetic construct
  source 1..9: note = Seed: LVVVGAGDV (KRAS G13D)
YVVFGAGDS

SEQ ID NO: 81289 - protein, 9 aa, synthetic construct
  source 1..9: note = Seed: LVVVGAGDV (KRAS G13D)
YVVFGAGDT

SEQ ID NO: 81290 - protein, 9 aa, synthetic construct
  source 1..9: note = Seed: LVVVGAGDV (KRAS G13D)
YVVFGAGDV

SEQ ID NO: 81291 - protein, 9 aa, synthetic construct
  source 1..9: note = Seed: LVVVGAGDV (KRAS G13D)
YVVFGGGDA

SEQ ID NO: 81292 - protein, 9 aa, synthetic construct
  source 1..9: note = Seed: LVVVGAGDV (KRAS G13D)
YVVFGGGDI

SEQ ID NO: 81293 - protein, 9 aa, synthetic construct
  source 1..9: note = Seed: LVVVGAGDV (KRAS G13D)
YVVFGGGDL

SEQ ID NO: 81294 - protein, 9 aa, synthetic construct
  source 1..9: note = Seed: LVVVGAGDV (KRAS G13D)
YVVFGGGDM

SEQ ID NO: 81295 - protein, 9 aa, synthetic construct
  source 1..9: note = Seed: LVVVGAGDV (KRAS G13D)
YVVFGGGDV

SEQ ID NO: 81296 - protein, 9 aa, synthetic construct
  source 1..9: note = Seed: LVVVGAGDV (KRAS G13D)
YVVFGKGDA

SEQ ID NO: 81297 - protein, 9 aa, synthetic construct
  source 1..9: note = Seed: LVVVGAGDV (KRAS G13D)
YVVFGNGDA

SEQ ID NO: 81298 - protein, 9 aa, synthetic construct
  source 1..9: note = Seed: LVVVGAGDV (KRAS G13D)
YVVFGNGDI

SEQ ID NO: 81299 - protein, 9 aa, synthetic construct
  source 1..9: note = Seed: LVVVGAGDV (KRAS G13D)
YVVFGNGDL

SEQ ID NO: 81300 - protein, 9 aa, synthetic construct
  source 1..9: note = Seed: LVVVGAGDV (KRAS G13D)
YVVFGNGDM

SEQ ID NO: 81301 - protein, 9 aa, synthetic construct
  source 1..9: note = Seed: LVVVGAGDV (KRAS G13D)
YVVFGNGDV

SEQ ID NO: 81302 - protein, 9 aa, synthetic construct
  source 1..9: note = Seed: LVVVGAGDV (KRAS G13D)
YVVFGPGDA

SEQ ID NO: 81303 - protein, 9 aa, synthetic construct
  source 1..9: note = Seed: LVVVGAGDV (KRAS G13D)
YVVFGPGDI

SEQ ID NO: 81304 - protein, 9 aa, synthetic construct
  source 1..9: note = Seed: LVVVGAGDV (KRAS G13D)
YVVFGPGDL

SEQ ID NO: 81305 - protein, 9 aa, synthetic construct
  source 1..9: note = Seed: LVVVGAGDV (KRAS G13D)
YVVFGPGDM

SEQ ID NO: 81306 - protein, 9 aa, synthetic construct
  source 1..9: note = Seed: LVVVGAGDV (KRAS G13D)
YVVFGPGDV

SEQ ID NO: 81307 - protein, 9 aa, synthetic construct
  source 1..9: note = Seed: LVVVGAGDV (KRAS G13D)
YVVFGRGDA

SEQ ID NO: 81308 - protein, 9 aa, synthetic construct
  source 1..9: note = Seed: LVVVGAGDV (KRAS G13D)
YVVFGRGDS

SEQ ID NO: 81309 - protein, 9 aa, synthetic construct
  source 1..9: note = Seed: LVVVGAGDV (KRAS G13D)
YVVFGSGDA

SEQ ID NO: 81310 - protein, 9 aa, synthetic construct
  source 1..9: note = Seed: LVVVGAGDV (KRAS G13D)
YVVFGSGDI

SEQ ID NO: 81311 - protein, 9 aa, synthetic construct
  source 1..9: note = Seed: LVVVGAGDV (KRAS G13D)
YVVFGSGDL

SEQ ID NO: 81312 - protein, 9 aa, synthetic construct
  source 1..9: note = Seed: LVVVGAGDV (KRAS G13D)
YVVFGSGDM

SEQ ID NO: 81313 - protein, 9 aa, synthetic construct
  source 1..9: note = Seed: LVVVGAGDV (KRAS G13D)
YVVFGSGDV

SEQ ID NO: 81314 - protein, 9 aa, synthetic construct
  source 1..9: note = Seed: LVVVGAGDV (KRAS G13D)
YVVFGTGDA

SEQ ID NO: 81315 - protein, 9 aa, synthetic construct
  source 1..9: note = Seed: LVVVGAGDV (KRAS G13D)
YVVFGTGDI

SEQ ID NO: 81316 - protein, 9 aa, synthetic construct
  source 1..9: note = Seed: LVVVGAGDV (KRAS G13D)
YVVFGTGDL

SEQ ID NO: 81317 - protein, 9 aa, synthetic construct
  source 1..9: note = Seed: LVVVGAGDV (KRAS G13D)
YVVFGTGDM

SEQ ID NO: 81318 - protein, 9 aa, synthetic construct
  source 1..9: note = Seed: LVVVGAGDV (KRAS G13D)
YVVFGTGDV

SEQ ID NO: 81319 - protein, 9 aa, synthetic construct
  source 1..9: note = Seed: LVVVGAGDV (KRAS G13D)
YVVFGVGDA

SEQ ID NO: 81320 - protein, 9 aa, synthetic construct
  source 1..9: note = Seed: LVVVGAGDV (KRAS G13D)
YVVFGVGDL

SEQ ID NO: 81321 - protein, 9 aa, synthetic construct
  source 1..9: note = Seed: LVVVGAGDV (KRAS G13D)
YVVGGAGDA

SEQ ID NO: 81322 - protein, 9 aa, synthetic construct
  source 1..9: note = Seed: LVVVGAGDV (KRAS G13D)
YVVGGAGDI

SEQ ID NO: 81323 - protein, 9 aa, synthetic construct
  source 1..9: note = Seed: LVVVGAGDV (KRAS G13D)
YVVGGAGDL

SEQ ID NO: 81324 - protein, 9 aa, synthetic construct
  source 1..9: note = Seed: LVVVGAGDV (KRAS G13D)
YVVGGAGDM

SEQ ID NO: 81325 - protein, 9 aa, synthetic construct
  source 1..9: note = Seed: LVVVGAGDV (KRAS G13D)
YVVGGAGDV

SEQ ID NO: 81326 - protein, 9 aa, synthetic construct
  source 1..9: note = Seed: LVVVGAGDV (KRAS G13D)
YVVGGGGDL

SEQ ID NO: 81327 - protein, 9 aa, synthetic construct
  source 1..9: note = Seed: LVVVGAGDV (KRAS G13D)
YVVGGNGDI

SEQ ID NO: 81328 - protein, 9 aa, synthetic construct
  source 1..9: note = Seed: LVVVGAGDV (KRAS G13D)
YVVGGNGDL

SEQ ID NO: 81329 - protein, 9 aa, synthetic construct
  source 1..9: note = Seed: LVVVGAGDV (KRAS G13D)
YVVGGNGDV

SEQ ID NO: 81330 - protein, 9 aa, synthetic construct
  source 1..9: note = Seed: LVVVGAGDV (KRAS G13D)
YVVGGPGDI

SEQ ID NO: 81331 - protein, 9 aa, synthetic construct
  source 1..9: note = Seed: LVVVGAGDV (KRAS G13D)
YVVGGPGDL

SEQ ID NO: 81332 - protein, 9 aa, synthetic construct
  source 1..9: note = Seed: LVVVGAGDV (KRAS G13D)
YVVGGPGDV

SEQ ID NO: 81333 - protein, 9 aa, synthetic construct
  source 1..9: note = Seed: LVVVGAGDV (KRAS G13D)
YVVGGSGDI

SEQ ID NO: 81334 - protein, 9 aa, synthetic construct
  source 1..9: note = Seed: LVVVGAGDV (KRAS G13D)
YVVGGSGDL

SEQ ID NO: 81335 - protein, 9 aa, synthetic construct
  source 1..9: note = Seed: LVVVGAGDV (KRAS G13D)
YVVGGSGDM

SEQ ID NO: 81336 - protein, 9 aa, synthetic construct
  source 1..9: note = Seed: LVVVGAGDV (KRAS G13D)
YVVGGSGDV

SEQ ID NO: 81337 - protein, 9 aa, synthetic construct
  source 1..9: note = Seed: LVVVGAGDV (KRAS G13D)
YVVGGTGDL

SEQ ID NO: 81338 - protein, 9 aa, synthetic construct
  source 1..9: note = Seed: LVVVGAGDV (KRAS G13D)
YVVGGVGDI

SEQ ID NO: 81339 - protein, 9 aa, synthetic construct
  source 1..9: note = Seed: LVVVGAGDV (KRAS G13D)
YVVGGVGDL

SEQ ID NO: 81340 - protein, 9 aa, synthetic construct
  source 1..9: note = Seed: LVVVGAGDV (KRAS G13D)
YVVGGVGDV

SEQ ID NO: 81341 - protein, 9 aa, synthetic construct
  source 1..9: note = Seed: LVVVGAGDV (KRAS G13D)
YVVHGAGDA

SEQ ID NO: 81342 - protein, 9 aa, synthetic construct
  source 1..9: note = Seed: LVVVGAGDV (KRAS G13D)
YVVHGAGDI

SEQ ID NO: 81343 - protein, 9 aa, synthetic construct
  source 1..9: note = Seed: LVVVGAGDV (KRAS G13D)
YVVHGAGDL

SEQ ID NO: 81344 - protein, 9 aa, synthetic construct
  source 1..9: note = Seed: LVVVGAGDV (KRAS G13D)
YVVHGAGDM

SEQ ID NO: 81345 - protein, 9 aa, synthetic construct
  source 1..9: note = Seed: LVVVGAGDV (KRAS G13D)
YVVHGAGDV

SEQ ID NO: 81346 - protein, 9 aa, synthetic construct
  source 1..9: note = Seed: LVVVGAGDV (KRAS G13D)
YVVHGFGDI

SEQ ID NO: 81347 - protein, 9 aa, synthetic construct
  source 1..9: note = Seed: LVVVGAGDV (KRAS G13D)
YVVHGFGDL

SEQ ID NO: 81348 - protein, 9 aa, synthetic construct
  source 1..9: note = Seed: LVVVGAGDV (KRAS G13D)
YVVHGFGDV

SEQ ID NO: 81349 - protein, 9 aa, synthetic construct
  source 1..9: note = Seed: LVVVGAGDV (KRAS G13D)
YVVHGGGDL

SEQ ID NO: 81350 - protein, 9 aa, synthetic construct
  source 1..9: note = Seed: LVVVGAGDV (KRAS G13D)
YVVHGGGDV

SEQ ID NO: 81351 - protein, 9 aa, synthetic construct
  source 1..9: note = Seed: LVVVGAGDV (KRAS G13D)
YVVHGSGDI

SEQ ID NO: 81352 - protein, 9 aa, synthetic construct
  source 1..9: note = Seed: LVVVGAGDV (KRAS G13D)
YVVHGSGDL

SEQ ID NO: 81353 - protein, 9 aa, synthetic construct
  source 1..9: note = Seed: LVVVGAGDV (KRAS G13D)
YVVHGSGDV

SEQ ID NO: 81354 - protein, 9 aa, synthetic construct
  source 1..9: note = Seed: LVVVGAGDV (KRAS G13D)
YVVIGAGDA

SEQ ID NO: 81355 - protein, 9 aa, synthetic construct
  source 1..9: note = Seed: LVVVGAGDV (KRAS G13D)
YVVIGAGDC

SEQ ID NO: 81356 - protein, 9 aa, synthetic construct
  source 1..9: note = Seed: LVVVGAGDV (KRAS G13D)
YVVIGAGDF

SEQ ID NO: 81357 - protein, 9 aa, synthetic construct
  source 1..9: note = Seed: LVVVGAGDV (KRAS G13D)
YVVIGAGDG

SEQ ID NO: 81358 - protein, 9 aa, synthetic construct
  source 1..9: note = Seed: LVVVGAGDV (KRAS G13D)
YVVIGAGDH

SEQ ID NO: 81359 - protein, 9 aa, synthetic construct
  source 1..9: note = Seed: LVVVGAGDV (KRAS G13D)
YVVIGAGDI

SEQ ID NO: 81360 - protein, 9 aa, synthetic construct
  source 1..9: note = Seed: LVVVGAGDV (KRAS G13D)
YVVIGAGDL

SEQ ID NO: 81361 - protein, 9 aa, synthetic construct
  source 1..9: note = Seed: LVVVGAGDV (KRAS G13D)
YVVIGAGDM

SEQ ID NO: 81362 - protein, 9 aa, synthetic construct
  source 1..9: note = Seed: LVVVGAGDV (KRAS G13D)
YVVIGAGDN

SEQ ID NO: 81363 - protein, 9 aa, synthetic construct
  source 1..9: note = Seed: LVVVGAGDV (KRAS G13D)
YVVIGAGDP

SEQ ID NO: 81364 - protein, 9 aa, synthetic construct
  source 1..9: note = Seed: LVVVGAGDV (KRAS G13D)
YVVIGAGDQ

SEQ ID NO: 81365 - protein, 9 aa, synthetic construct
  source 1..9: note = Seed: LVVVGAGDV (KRAS G13D)
YVVIGAGDS

SEQ ID NO: 81366 - protein, 9 aa, synthetic construct
  source 1..9: note = Seed: LVVVGAGDV (KRAS G13D)
YVVIGAGDT

SEQ ID NO: 81367 - protein, 9 aa, synthetic construct
  source 1..9: note = Seed: LVVVGAGDV (KRAS G13D)
YVVIGAGDV

SEQ ID NO: 81368 - protein, 9 aa, synthetic construct
  source 1..9: note = Seed: LVVVGAGDV (KRAS G13D)
YVVIGAGDY

SEQ ID NO: 81369 - protein, 9 aa, synthetic construct
  source 1..9: note = Seed: LVVVGAGDV (KRAS G13D)
YVVIGFGDI

SEQ ID NO: 81370 - protein, 9 aa, synthetic construct
  source 1..9: note = Seed: LVVVGAGDV (KRAS G13D)
YVVIGFGDL

SEQ ID NO: 81371 - protein, 9 aa, synthetic construct
  source 1..9: note = Seed: LVVVGAGDV (KRAS G13D)
YVVIGFGDV

SEQ ID NO: 81372 - protein, 9 aa, synthetic construct
  source 1..9: note = Seed: LVVVGAGDV (KRAS G13D)
YVVIGGGDA

SEQ ID NO: 81373 - protein, 9 aa, synthetic construct
  source 1..9: note = Seed: LVVVGAGDV (KRAS G13D)
YVVIGGGDC

SEQ ID NO: 81374 - protein, 9 aa, synthetic construct
  source 1..9: note = Seed: LVVVGAGDV (KRAS G13D)
YVVIGGGDF

SEQ ID NO: 81375 - protein, 9 aa, synthetic construct
  source 1..9: note = Seed: LVVVGAGDV (KRAS G13D)
YVVIGGGDG

SEQ ID NO: 81376 - protein, 9 aa, synthetic construct
  source 1..9: note = Seed: LVVVGAGDV (KRAS G13D)
YVVIGGGDI

SEQ ID NO: 81377 - protein, 9 aa, synthetic construct
  source 1..9: note = Seed: LVVVGAGDV (KRAS G13D)
YVVIGGGDL

SEQ ID NO: 81378 - protein, 9 aa, synthetic construct
  source 1..9: note = Seed: LVVVGAGDV (KRAS G13D)
YVVIGGGDM

SEQ ID NO: 81379 - protein, 9 aa, synthetic construct
  source 1..9: note = Seed: LVVVGAGDV (KRAS G13D)
YVVIGGGDN

SEQ ID NO: 81380 - protein, 9 aa, synthetic construct
  source 1..9: note = Seed: LVVVGAGDV (KRAS G13D)
YVVIGGGDS

SEQ ID NO: 81381 - protein, 9 aa, synthetic construct
  source 1..9: note = Seed: LVVVGAGDV (KRAS G13D)
YVVIGGGDT

SEQ ID NO: 81382 - protein, 9 aa, synthetic construct
  source 1..9: note = Seed: LVVVGAGDV (KRAS G13D)
YVVIGGGDV

SEQ ID NO: 81383 - protein, 9 aa, synthetic construct
  source 1..9: note = Seed: LVVVGAGDV (KRAS G13D)
YVVIGHGDA

SEQ ID NO: 81384 - protein, 9 aa, synthetic construct
  source 1..9: note = Seed: LVVVGAGDV (KRAS G13D)
YVVIGHGDI

SEQ ID NO: 81385 - protein, 9 aa, synthetic construct
  source 1..9: note = Seed: LVVVGAGDV (KRAS G13D)
YVVIGHGDL

SEQ ID NO: 81386 - protein, 9 aa, synthetic construct
  source 1..9: note = Seed: LVVVGAGDV (KRAS G13D)
YVVIGHGDM

SEQ ID NO: 81387 - protein, 9 aa, synthetic construct
  source 1..9: note = Seed: LVVVGAGDV (KRAS G13D)
YVVIGHGDS

SEQ ID NO: 81388 - protein, 9 aa, synthetic construct
  source 1..9: note = Seed: LVVVGAGDV (KRAS G13D)
YVVIGHGDV

SEQ ID NO: 81389 - protein, 9 aa, synthetic construct
  source 1..9: note = Seed: LVVVGAGDV (KRAS G13D)
YVVIGIGDA

SEQ ID NO: 81390 - protein, 9 aa, synthetic construct
  source 1..9: note = Seed: LVVVGAGDV (KRAS G13D)
YVVIGIGDH

SEQ ID NO: 81391 - protein, 9 aa, synthetic construct
  source 1..9: note = Seed: LVVVGAGDV (KRAS G13D)
YVVIGIGDI

SEQ ID NO: 81392 - protein, 9 aa, synthetic construct
  source 1..9: note = Seed: LVVVGAGDV (KRAS G13D)
YVVIGIGDL

SEQ ID NO: 81393 - protein, 9 aa, synthetic construct
  source 1..9: note = Seed: LVVVGAGDV (KRAS G13D)
YVVIGIGDM

SEQ ID NO: 81394 - protein, 9 aa, synthetic construct
  source 1..9: note = Seed: LVVVGAGDV (KRAS G13D)
YVVIGIGDN

SEQ ID NO: 81395 - protein, 9 aa, synthetic construct
  source 1..9: note = Seed: LVVVGAGDV (KRAS G13D)
YVVIGIGDQ

SEQ ID NO: 81396 - protein, 9 aa, synthetic construct
  source 1..9: note = Seed: LVVVGAGDV (KRAS G13D)
YVVIGIGDS

SEQ ID NO: 81397 - protein, 9 aa, synthetic construct
  source 1..9: note = Seed: LVVVGAGDV (KRAS G13D)
YVVIGIGDT

SEQ ID NO: 81398 - protein, 9 aa, synthetic construct
  source 1..9: note = Seed: LVVVGAGDV (KRAS G13D)
YVVIGIGDV

SEQ ID NO: 81399 - protein, 9 aa, synthetic construct
  source 1..9: note = Seed: LVVVGAGDV (KRAS G13D)
YVVIGKGDA

SEQ ID NO: 81400 - protein, 9 aa, synthetic construct
  source 1..9: note = Seed: LVVVGAGDV (KRAS G13D)
YVVIGKGDG

SEQ ID NO: 81401 - protein, 9 aa, synthetic construct
  source 1..9: note = Seed: LVVVGAGDV (KRAS G13D)
YVVIGKGDH

SEQ ID NO: 81402 - protein, 9 aa, synthetic construct
  source 1..9: note = Seed: LVVVGAGDV (KRAS G13D)
YVVIGKGDI

SEQ ID NO: 81403 - protein, 9 aa, synthetic construct
  source 1..9: note = Seed: LVVVGAGDV (KRAS G13D)
YVVIGKGDL

SEQ ID NO: 81404 - protein, 9 aa, synthetic construct
  source 1..9: note = Seed: LVVVGAGDV (KRAS G13D)
YVVIGKGDM

SEQ ID NO: 81405 - protein, 9 aa, synthetic construct
  source 1..9: note = Seed: LVVVGAGDV (KRAS G13D)
YVVIGKGDN

SEQ ID NO: 81406 - protein, 9 aa, synthetic construct
  source 1..9: note = Seed: LVVVGAGDV (KRAS G13D)
YVVIGKGDQ

SEQ ID NO: 81407 - protein, 9 aa, synthetic construct
  source 1..9: note = Seed: LVVVGAGDV (KRAS G13D)
YVVIGKGDS

SEQ ID NO: 81408 - protein, 9 aa, synthetic construct
  source 1..9: note = Seed: LVVVGAGDV (KRAS G13D)
YVVIGKGDT

SEQ ID NO: 81409 - protein, 9 aa, synthetic construct
  source 1..9: note = Seed: LVVVGAGDV (KRAS G13D)
YVVIGKGDV

SEQ ID NO: 81410 - protein, 9 aa, synthetic construct
  source 1..9: note = Seed: LVVVGAGDV (KRAS G13D)
YVVIGLGDA

SEQ ID NO: 81411 - protein, 9 aa, synthetic construct
  source 1..9: note = Seed: LVVVGAGDV (KRAS G13D)
YVVIGLGDH

SEQ ID NO: 81412 - protein, 9 aa, synthetic construct
  source 1..9: note = Seed: LVVVGAGDV (KRAS G13D)
YVVIGLGDI

SEQ ID NO: 81413 - protein, 9 aa, synthetic construct
  source 1..9: note = Seed: LVVVGAGDV (KRAS G13D)
YVVIGLGDL

SEQ ID NO: 81414 - protein, 9 aa, synthetic construct
  source 1..9: note = Seed: LVVVGAGDV (KRAS G13D)
YVVIGLGDM

SEQ ID NO: 81415 - protein, 9 aa, synthetic construct
  source 1..9: note = Seed: LVVVGAGDV (KRAS G13D)
YVVIGLGDN

SEQ ID NO: 81416 - protein, 9 aa, synthetic construct
  source 1..9: note = Seed: LVVVGAGDV (KRAS G13D)
YVVIGLGDQ

SEQ ID NO: 81417 - protein, 9 aa, synthetic construct
  source 1..9: note = Seed: LVVVGAGDV (KRAS G13D)
YVVIGLGDS

SEQ ID NO: 81418 - protein, 9 aa, synthetic construct
  source 1..9: note = Seed: LVVVGAGDV (KRAS G13D)
YVVIGLGDT

SEQ ID NO: 81419 - protein, 9 aa, synthetic construct
  source 1..9: note = Seed: LVVVGAGDV (KRAS G13D)
YVVIGLGDV

SEQ ID NO: 81420 - protein, 9 aa, synthetic construct
  source 1..9: note = Seed: LVVVGAGDV (KRAS G13D)
YVVIGMGDA

SEQ ID NO: 81421 - protein, 9 aa, synthetic construct
  source 1..9: note = Seed: LVVVGAGDV (KRAS G13D)
YVVIGMGDH

SEQ ID NO: 81422 - protein, 9 aa, synthetic construct
  source 1..9: note = Seed: LVVVGAGDV (KRAS G13D)
YVVIGMGDI

SEQ ID NO: 81423 - protein, 9 aa, synthetic construct
  source 1..9: note = Seed: LVVVGAGDV (KRAS G13D)
YVVIGMGDL

SEQ ID NO: 81424 - protein, 9 aa, synthetic construct
  source 1..9: note = Seed: LVVVGAGDV (KRAS G13D)
YVVIGMGDM

SEQ ID NO: 81425 - protein, 9 aa, synthetic construct
  source 1..9: note = Seed: LVVVGAGDV (KRAS G13D)
YVVIGMGDN

SEQ ID NO: 81426 - protein, 9 aa, synthetic construct
  source 1..9: note = Seed: LVVVGAGDV (KRAS G13D)
YVVIGMGDQ

SEQ ID NO: 81427 - protein, 9 aa, synthetic construct
  source 1..9: note = Seed: LVVVGAGDV (KRAS G13D)
YVVIGMGDS

SEQ ID NO: 81428 - protein, 9 aa, synthetic construct
  source 1..9: note = Seed: LVVVGAGDV (KRAS G13D)
YVVIGMGDT

SEQ ID NO: 81429 - protein, 9 aa, synthetic construct
  source 1..9: note = Seed: LVVVGAGDV (KRAS G13D)
YVVIGMGDV

SEQ ID NO: 81430 - protein, 9 aa, synthetic construct
  source 1..9: note = Seed: LVVVGAGDV (KRAS G13D)
YVVIGNGDA

SEQ ID NO: 81431 - protein, 9 aa, synthetic construct
  source 1..9: note = Seed: LVVVGAGDV (KRAS G13D)
YVVIGNGDD

SEQ ID NO: 81432 - protein, 9 aa, synthetic construct
  source 1..9: note = Seed: LVVVGAGDV (KRAS G13D)
YVVIGNGDE

SEQ ID NO: 81433 - protein, 9 aa, synthetic construct
  source 1..9: note = Seed: LVVVGAGDV (KRAS G13D)
YVVIGNGDG

SEQ ID NO: 81434 - protein, 9 aa, synthetic construct
  source 1..9: note = Seed: LVVVGAGDV (KRAS G13D)
YVVIGNGDI

SEQ ID NO: 81435 - protein, 9 aa, synthetic construct
  source 1..9: note = Seed: LVVVGAGDV (KRAS G13D)
YVVIGNGDL

SEQ ID NO: 81436 - protein, 9 aa, synthetic construct
  source 1..9: note = Seed: LVVVGAGDV (KRAS G13D)
YVVIGNGDM

SEQ ID NO: 81437 - protein, 9 aa, synthetic construct
  source 1..9: note = Seed: LVVVGAGDV (KRAS G13D)
YVVIGNGDN

SEQ ID NO: 81438 - protein, 9 aa, synthetic construct
  source 1..9: note = Seed: LVVVGAGDV (KRAS G13D)
YVVIGNGDS

SEQ ID NO: 81439 - protein, 9 aa, synthetic construct
  source 1..9: note = Seed: LVVVGAGDV (KRAS G13D)
YVVIGNGDT

SEQ ID NO: 81440 - protein, 9 aa, synthetic construct
  source 1..9: note = Seed: LVVVGAGDV (KRAS G13D)
YVVIGNGDV

SEQ ID NO: 81441 - protein, 9 aa, synthetic construct
  source 1..9: note = Seed: LVVVGAGDV (KRAS G13D)
YVVIGPGDA

SEQ ID NO: 81442 - protein, 9 aa, synthetic construct
  source 1..9: note = Seed: LVVVGAGDV (KRAS G13D)
YVVIGPGDF

SEQ ID NO: 81443 - protein, 9 aa, synthetic construct
  source 1..9: note = Seed: LVVVGAGDV (KRAS G13D)
YVVIGPGDG

SEQ ID NO: 81444 - protein, 9 aa, synthetic construct
  source 1..9: note = Seed: LVVVGAGDV (KRAS G13D)
YVVIGPGDH

SEQ ID NO: 81445 - protein, 9 aa, synthetic construct
  source 1..9: note = Seed: LVVVGAGDV (KRAS G13D)
YVVIGPGDI

SEQ ID NO: 81446 - protein, 9 aa, synthetic construct
  source 1..9: note = Seed: LVVVGAGDV (KRAS G13D)
YVVIGPGDL

SEQ ID NO: 81447 - protein, 9 aa, synthetic construct
  source 1..9: note = Seed: LVVVGAGDV (KRAS G13D)
YVVIGPGDM

SEQ ID NO: 81448 - protein, 9 aa, synthetic construct
  source 1..9: note = Seed: LVVVGAGDV (KRAS G13D)
YVVIGPGDN

SEQ ID NO: 81449 - protein, 9 aa, synthetic construct
  source 1..9: note = Seed: LVVVGAGDV (KRAS G13D)
YVVIGPGDQ

SEQ ID NO: 81450 - protein, 9 aa, synthetic construct
  source 1..9: note = Seed: LVVVGAGDV (KRAS G13D)
YVVIGPGDS

SEQ ID NO: 81451 - protein, 9 aa, synthetic construct
  source 1..9: note = Seed: LVVVGAGDV (KRAS G13D)
YVVIGPGDT

SEQ ID NO: 81452 - protein, 9 aa, synthetic construct
  source 1..9: note = Seed: LVVVGAGDV (KRAS G13D)
YVVIGPGDV

SEQ ID NO: 81453 - protein, 9 aa, synthetic construct
  source 1..9: note = Seed: LVVVGAGDV (KRAS G13D)
YVVIGQGDL

SEQ ID NO: 81454 - protein, 9 aa, synthetic construct
  source 1..9: note = Seed: LVVVGAGDV (KRAS G13D)
YVVIGRGDA

SEQ ID NO: 81455 - protein, 9 aa, synthetic construct
  source 1..9: note = Seed: LVVVGAGDV (KRAS G13D)
YVVIGRGDG

SEQ ID NO: 81456 - protein, 9 aa, synthetic construct
  source 1..9: note = Seed: LVVVGAGDV (KRAS G13D)
YVVIGRGDH

SEQ ID NO: 81457 - protein, 9 aa, synthetic construct
  source 1..9: note = Seed: LVVVGAGDV (KRAS G13D)
YVVIGRGDI

SEQ ID NO: 81458 - protein, 9 aa, synthetic construct
  source 1..9: note = Seed: LVVVGAGDV (KRAS G13D)
YVVIGRGDK

SEQ ID NO: 81459 - protein, 9 aa, synthetic construct
  source 1..9: note = Seed: LVVVGAGDV (KRAS G13D)
YVVIGRGDL

SEQ ID NO: 81460 - protein, 9 aa, synthetic construct
  source 1..9: note = Seed: LVVVGAGDV (KRAS G13D)
YVVIGRGDM

SEQ ID NO: 81461 - protein, 9 aa, synthetic construct
  source 1..9: note = Seed: LVVVGAGDV (KRAS G13D)
YVVIGRGDN

SEQ ID NO: 81462 - protein, 9 aa, synthetic construct
  source 1..9: note = Seed: LVVVGAGDV (KRAS G13D)
YVVIGRGDP

SEQ ID NO: 81463 - protein, 9 aa, synthetic construct
  source 1..9: note = Seed: LVVVGAGDV (KRAS G13D)
YVVIGRGDQ

SEQ ID NO: 81464 - protein, 9 aa, synthetic construct
  source 1..9: note = Seed: LVVVGAGDV (KRAS G13D)
YVVIGRGDS

SEQ ID NO: 81465 - protein, 9 aa, synthetic construct
  source 1..9: note = Seed: LVVVGAGDV (KRAS G13D)
YVVIGRGDT

SEQ ID NO: 81466 - protein, 9 aa, synthetic construct
  source 1..9: note = Seed: LVVVGAGDV (KRAS G13D)
YVVIGRGDV

SEQ ID NO: 81467 - protein, 9 aa, synthetic construct
  source 1..9: note = Seed: LVVVGAGDV (KRAS G13D)
YVVIGSGDA

SEQ ID NO: 81468 - protein, 9 aa, synthetic construct
  source 1..9: note = Seed: LVVVGAGDV (KRAS G13D)
YVVIGSGDC

SEQ ID NO: 81469 - protein, 9 aa, synthetic construct
  source 1..9: note = Seed: LVVVGAGDV (KRAS G13D)
YVVIGSGDF

SEQ ID NO: 81470 - protein, 9 aa, synthetic construct
  source 1..9: note = Seed: LVVVGAGDV (KRAS G13D)
YVVIGSGDG

SEQ ID NO: 81471 - protein, 9 aa, synthetic construct
  source 1..9: note = Seed: LVVVGAGDV (KRAS G13D)
YVVIGSGDH

SEQ ID NO: 81472 - protein, 9 aa, synthetic construct
  source 1..9: note = Seed: LVVVGAGDV (KRAS G13D)
YVVIGSGDI

SEQ ID NO: 81473 - protein, 9 aa, synthetic construct
  source 1..9: note = Seed: LVVVGAGDV (KRAS G13D)
YVVIGSGDL

SEQ ID NO: 81474 - protein, 9 aa, synthetic construct
  source 1..9: note = Seed: LVVVGAGDV (KRAS G13D)
YVVIGSGDM

SEQ ID NO: 81475 - protein, 9 aa, synthetic construct
  source 1..9: note = Seed: LVVVGAGDV (KRAS G13D)
YVVIGSGDN

SEQ ID NO: 81476 - protein, 9 aa, synthetic construct
  source 1..9: note = Seed: LVVVGAGDV (KRAS G13D)
YVVIGSGDQ

SEQ ID NO: 81477 - protein, 9 aa, synthetic construct
  source 1..9: note = Seed: LVVVGAGDV (KRAS G13D)
YVVIGSGDS

SEQ ID NO: 81478 - protein, 9 aa, synthetic construct
  source 1..9: note = Seed: LVVVGAGDV (KRAS G13D)
YVVIGSGDT

SEQ ID NO: 81479 - protein, 9 aa, synthetic construct
  source 1..9: note = Seed: LVVVGAGDV (KRAS G13D)
YVVIGSGDV

SEQ ID NO: 81480 - protein, 9 aa, synthetic construct
  source 1..9: note = Seed: LVVVGAGDV (KRAS G13D)
YVVIGTGDA

SEQ ID NO: 81481 - protein, 9 aa, synthetic construct
  source 1..9: note = Seed: LVVVGAGDV (KRAS G13D)
YVVIGTGDH

SEQ ID NO: 81482 - protein, 9 aa, synthetic construct
  source 1..9: note = Seed: LVVVGAGDV (KRAS G13D)
YVVIGTGDI

SEQ ID NO: 81483 - protein, 9 aa, synthetic construct
  source 1..9: note = Seed: LVVVGAGDV (KRAS G13D)
YVVIGTGDL

SEQ ID NO: 81484 - protein, 9 aa, synthetic construct
  source 1..9: note = Seed: LVVVGAGDV (KRAS G13D)
YVVIGTGDM

SEQ ID NO: 81485 - protein, 9 aa, synthetic construct
  source 1..9: note = Seed: LVVVGAGDV (KRAS G13D)
YVVIGTGDN

SEQ ID NO: 81486 - protein, 9 aa, synthetic construct
  source 1..9: note = Seed: LVVVGAGDV (KRAS G13D)
YVVIGTGDQ

SEQ ID NO: 81487 - protein, 9 aa, synthetic construct
  source 1..9: note = Seed: LVVVGAGDV (KRAS G13D)
YVVIGTGDS

SEQ ID NO: 81488 - protein, 9 aa, synthetic construct
  source 1..9: note = Seed: LVVVGAGDV (KRAS G13D)
YVVIGTGDT

SEQ ID NO: 81489 - protein, 9 aa, synthetic construct
  source 1..9: note = Seed: LVVVGAGDV (KRAS G13D)
YVVIGTGDV

SEQ ID NO: 81490 - protein, 9 aa, synthetic construct
  source 1..9: note = Seed: LVVVGAGDV (KRAS G13D)
YVVIGVGDA

SEQ ID NO: 81491 - protein, 9 aa, synthetic construct
  source 1..9: note = Seed: LVVVGAGDV (KRAS G13D)
YVVIGVGDG

SEQ ID NO: 81492 - protein, 9 aa, synthetic construct
  source 1..9: note = Seed: LVVVGAGDV (KRAS G13D)
YVVIGVGDH

SEQ ID NO: 81493 - protein, 9 aa, synthetic construct
  source 1..9: note = Seed: LVVVGAGDV (KRAS G13D)
YVVIGVGDI

SEQ ID NO: 81494 - protein, 9 aa, synthetic construct
  source 1..9: note = Seed: LVVVGAGDV (KRAS G13D)
YVVIGVGDL

SEQ ID NO: 81495 - protein, 9 aa, synthetic construct
  source 1..9: note = Seed: LVVVGAGDV (KRAS G13D)
YVVIGVGDM

SEQ ID NO: 81496 - protein, 9 aa, synthetic construct
  source 1..9: note = Seed: LVVVGAGDV (KRAS G13D)
YVVIGVGDN

SEQ ID NO: 81497 - protein, 9 aa, synthetic construct
  source 1..9: note = Seed: LVVVGAGDV (KRAS G13D)
YVVIGVGDP

SEQ ID NO: 81498 - protein, 9 aa, synthetic construct
  source 1..9: note = Seed: LVVVGAGDV (KRAS G13D)
YVVIGVGDQ

SEQ ID NO: 81499 - protein, 9 aa, synthetic construct
  source 1..9: note = Seed: LVVVGAGDV (KRAS G13D)
YVVIGVGDS

SEQ ID NO: 81500 - protein, 9 aa, synthetic construct
  source 1..9: note = Seed: LVVVGAGDV (KRAS G13D)
YVVIGVGDT

SEQ ID NO: 81501 - protein, 9 aa, synthetic construct
  source 1..9: note = Seed: LVVVGAGDV (KRAS G13D)
YVVIGVGDV

SEQ ID NO: 81502 - protein, 9 aa, synthetic construct
  source 1..9: note = Seed: LVVVGAGDV (KRAS G13D)
YVVKGKGDA

SEQ ID NO: 81503 - protein, 9 aa, synthetic construct
  source 1..9: note = Seed: LVVVGAGDV (KRAS G13D)
YVVLGAGDA

SEQ ID NO: 81504 - protein, 9 aa, synthetic construct
  source 1..9: note = Seed: LVVVGAGDV (KRAS G13D)
YVVLGAGDC

SEQ ID NO: 81505 - protein, 9 aa, synthetic construct
  source 1..9: note = Seed: LVVVGAGDV (KRAS G13D)
YVVLGAGDF

SEQ ID NO: 81506 - protein, 9 aa, synthetic construct
  source 1..9: note = Seed: LVVVGAGDV (KRAS G13D)
YVVLGAGDG

SEQ ID NO: 81507 - protein, 9 aa, synthetic construct
  source 1..9: note = Seed: LVVVGAGDV (KRAS G13D)
YVVLGAGDH

SEQ ID NO: 81508 - protein, 9 aa, synthetic construct
  source 1..9: note = Seed: LVVVGAGDV (KRAS G13D)
YVVLGAGDI

SEQ ID NO: 81509 - protein, 9 aa, synthetic construct
  source 1..9: note = Seed: LVVVGAGDV (KRAS G13D)
YVVLGAGDK

SEQ ID NO: 81510 - protein, 9 aa, synthetic construct
  source 1..9: note = Seed: LVVVGAGDV (KRAS G13D)
YVVLGAGDL

SEQ ID NO: 81511 - protein, 9 aa, synthetic construct
  source 1..9: note = Seed: LVVVGAGDV (KRAS G13D)
YVVLGAGDM

SEQ ID NO: 81512 - protein, 9 aa, synthetic construct
  source 1..9: note = Seed: LVVVGAGDV (KRAS G13D)
YVVLGAGDN

SEQ ID NO: 81513 - protein, 9 aa, synthetic construct
  source 1..9: note = Seed: LVVVGAGDV (KRAS G13D)
YVVLGAGDP

SEQ ID NO: 81514 - protein, 9 aa, synthetic construct
  source 1..9: note = Seed: LVVVGAGDV (KRAS G13D)
YVVLGAGDQ

SEQ ID NO: 81515 - protein, 9 aa, synthetic construct
  source 1..9: note = Seed: LVVVGAGDV (KRAS G13D)
YVVLGAGDR

SEQ ID NO: 81516 - protein, 9 aa, synthetic construct
  source 1..9: note = Seed: LVVVGAGDV (KRAS G13D)
YVVLGAGDS

SEQ ID NO: 81517 - protein, 9 aa, synthetic construct
  source 1..9: note = Seed: LVVVGAGDV (KRAS G13D)
YVVLGAGDT

SEQ ID NO: 81518 - protein, 9 aa, synthetic construct
  source 1..9: note = Seed: LVVVGAGDV (KRAS G13D)
YVVLGAGDV

SEQ ID NO: 81519 - protein, 9 aa, synthetic construct
  source 1..9: note = Seed: LVVVGAGDV (KRAS G13D)
YVVLGAGDW

SEQ ID NO: 81520 - protein, 9 aa, synthetic construct
  source 1..9: note = Seed: LVVVGAGDV (KRAS G13D)
YVVLGAGDY

SEQ ID NO: 81521 - protein, 9 aa, synthetic construct
  source 1..9: note = Seed: LVVVGAGDV (KRAS G13D)
YVVLGCGDA

SEQ ID NO: 81522 - protein, 9 aa, synthetic construct
  source 1..9: note = Seed: LVVVGAGDV (KRAS G13D)
YVVLGCGDI

SEQ ID NO: 81523 - protein, 9 aa, synthetic construct
  source 1..9: note = Seed: LVVVGAGDV (KRAS G13D)
YVVLGCGDL

SEQ ID NO: 81524 - protein, 9 aa, synthetic construct
  source 1..9: note = Seed: LVVVGAGDV (KRAS G13D)
YVVLGCGDV

SEQ ID NO: 81525 - protein, 9 aa, synthetic construct
  source 1..9: note = Seed: LVVVGAGDV (KRAS G13D)
YVVLGDGDL

SEQ ID NO: 81526 - protein, 9 aa, synthetic construct
  source 1..9: note = Seed: LVVVGAGDV (KRAS G13D)
YVVLGDGDV

SEQ ID NO: 81527 - protein, 9 aa, synthetic construct
  source 1..9: note = Seed: LVVVGAGDV (KRAS G13D)
YVVLGEGDL

SEQ ID NO: 81528 - protein, 9 aa, synthetic construct
  source 1..9: note = Seed: LVVVGAGDV (KRAS G13D)
YVVLGGGDA

SEQ ID NO: 81529 - protein, 9 aa, synthetic construct
  source 1..9: note = Seed: LVVVGAGDV (KRAS G13D)
YVVLGGGDC

SEQ ID NO: 81530 - protein, 9 aa, synthetic construct
  source 1..9: note = Seed: LVVVGAGDV (KRAS G13D)
YVVLGGGDF

SEQ ID NO: 81531 - protein, 9 aa, synthetic construct
  source 1..9: note = Seed: LVVVGAGDV (KRAS G13D)
YVVLGGGDG

SEQ ID NO: 81532 - protein, 9 aa, synthetic construct
  source 1..9: note = Seed: LVVVGAGDV (KRAS G13D)
YVVLGGGDH

SEQ ID NO: 81533 - protein, 9 aa, synthetic construct
  source 1..9: note = Seed: LVVVGAGDV (KRAS G13D)
YVVLGGGDI

SEQ ID NO: 81534 - protein, 9 aa, synthetic construct
  source 1..9: note = Seed: LVVVGAGDV (KRAS G13D)
YVVLGGGDL

SEQ ID NO: 81535 - protein, 9 aa, synthetic construct
  source 1..9: note = Seed: LVVVGAGDV (KRAS G13D)
YVVLGGGDM

SEQ ID NO: 81536 - protein, 9 aa, synthetic construct
  source 1..9: note = Seed: LVVVGAGDV (KRAS G13D)
YVVLGGGDN

SEQ ID NO: 81537 - protein, 9 aa, synthetic construct
  source 1..9: note = Seed: LVVVGAGDV (KRAS G13D)
YVVLGGGDP

SEQ ID NO: 81538 - protein, 9 aa, synthetic construct
  source 1..9: note = Seed: LVVVGAGDV (KRAS G13D)
YVVLGGGDQ

SEQ ID NO: 81539 - protein, 9 aa, synthetic construct
  source 1..9: note = Seed: LVVVGAGDV (KRAS G13D)
YVVLGGGDS

SEQ ID NO: 81540 - protein, 9 aa, synthetic construct
  source 1..9: note = Seed: LVVVGAGDV (KRAS G13D)
YVVLGGGDT

SEQ ID NO: 81541 - protein, 9 aa, synthetic construct
  source 1..9: note = Seed: LVVVGAGDV (KRAS G13D)
YVVLGGGDV

SEQ ID NO: 81542 - protein, 9 aa, synthetic construct
  source 1..9: note = Seed: LVVVGAGDV (KRAS G13D)
YVVLGGGDY

SEQ ID NO: 81543 - protein, 9 aa, synthetic construct
  source 1..9: note = Seed: LVVVGAGDV (KRAS G13D)
YVVLGHGDA

SEQ ID NO: 81544 - protein, 9 aa, synthetic construct
  source 1..9: note = Seed: LVVVGAGDV (KRAS G13D)
YVVLGHGDI

SEQ ID NO: 81545 - protein, 9 aa, synthetic construct
  source 1..9: note = Seed: LVVVGAGDV (KRAS G13D)
YVVLGHGDL

SEQ ID NO: 81546 - protein, 9 aa, synthetic construct
  source 1..9: note = Seed: LVVVGAGDV (KRAS G13D)
YVVLGHGDM

SEQ ID NO: 81547 - protein, 9 aa, synthetic construct
  source 1..9: note = Seed: LVVVGAGDV (KRAS G13D)
YVVLGHGDV

SEQ ID NO: 81548 - protein, 9 aa, synthetic construct
  source 1..9: note = Seed: LVVVGAGDV (KRAS G13D)
YVVLGIGDA

SEQ ID NO: 81549 - protein, 9 aa, synthetic construct
  source 1..9: note = Seed: LVVVGAGDV (KRAS G13D)
YVVLGIGDG

SEQ ID NO: 81550 - protein, 9 aa, synthetic construct
  source 1..9: note = Seed: LVVVGAGDV (KRAS G13D)
YVVLGIGDH

SEQ ID NO: 81551 - protein, 9 aa, synthetic construct
  source 1..9: note = Seed: LVVVGAGDV (KRAS G13D)
YVVLGIGDI

SEQ ID NO: 81552 - protein, 9 aa, synthetic construct
  source 1..9: note = Seed: LVVVGAGDV (KRAS G13D)
YVVLGIGDL

SEQ ID NO: 81553 - protein, 9 aa, synthetic construct
  source 1..9: note = Seed: LVVVGAGDV (KRAS G13D)
YVVLGIGDM

SEQ ID NO: 81554 - protein, 9 aa, synthetic construct
  source 1..9: note = Seed: LVVVGAGDV (KRAS G13D)
YVVLGIGDN

SEQ ID NO: 81555 - protein, 9 aa, synthetic construct
  source 1..9: note = Seed: LVVVGAGDV (KRAS G13D)
YVVLGIGDP

SEQ ID NO: 81556 - protein, 9 aa, synthetic construct
  source 1..9: note = Seed: LVVVGAGDV (KRAS G13D)
YVVLGIGDQ

SEQ ID NO: 81557 - protein, 9 aa, synthetic construct
  source 1..9: note = Seed: LVVVGAGDV (KRAS G13D)
YVVLGIGDS

SEQ ID NO: 81558 - protein, 9 aa, synthetic construct
  source 1..9: note = Seed: LVVVGAGDV (KRAS G13D)
YVVLGIGDT

SEQ ID NO: 81559 - protein, 9 aa, synthetic construct
  source 1..9: note = Seed: LVVVGAGDV (KRAS G13D)
YVVLGIGDV

SEQ ID NO: 81560 - protein, 9 aa, synthetic construct
  source 1..9: note = Seed: LVVVGAGDV (KRAS G13D)
YVVLGKGDA

SEQ ID NO: 81561 - protein, 9 aa, synthetic construct
  source 1..9: note = Seed: LVVVGAGDV (KRAS G13D)
YVVLGKGDG

SEQ ID NO: 81562 - protein, 9 aa, synthetic construct
  source 1..9: note = Seed: LVVVGAGDV (KRAS G13D)
YVVLGKGDH

SEQ ID NO: 81563 - protein, 9 aa, synthetic construct
  source 1..9: note = Seed: LVVVGAGDV (KRAS G13D)
YVVLGKGDM

SEQ ID NO: 81564 - protein, 9 aa, synthetic construct
  source 1..9: note = Seed: LVVVGAGDV (KRAS G13D)
YVVLGKGDS

SEQ ID NO: 81565 - protein, 9 aa, synthetic construct
  source 1..9: note = Seed: LVVVGAGDV (KRAS G13D)
YVVLGKGDT

SEQ ID NO: 81566 - protein, 9 aa, synthetic construct
  source 1..9: note = Seed: LVVVGAGDV (KRAS G13D)
YVVLGKGDV

SEQ ID NO: 81567 - protein, 9 aa, synthetic construct
  source 1..9: note = Seed: LVVVGAGDV (KRAS G13D)
YVVLGLGDA

SEQ ID NO: 81568 - protein, 9 aa, synthetic construct
  source 1..9: note = Seed: LVVVGAGDV (KRAS G13D)
YVVLGLGDI

SEQ ID NO: 81569 - protein, 9 aa, synthetic construct
  source 1..9: note = Seed: LVVVGAGDV (KRAS G13D)
YVVLGLGDL

SEQ ID NO: 81570 - protein, 9 aa, synthetic construct
  source 1..9: note = Seed: LVVVGAGDV (KRAS G13D)
YVVLGLGDM

SEQ ID NO: 81571 - protein, 9 aa, synthetic construct
  source 1..9: note = Seed: LVVVGAGDV (KRAS G13D)
YVVLGLGDN

SEQ ID NO: 81572 - protein, 9 aa, synthetic construct
  source 1..9: note = Seed: LVVVGAGDV (KRAS G13D)
YVVLGLGDS

SEQ ID NO: 81573 - protein, 9 aa, synthetic construct
  source 1..9: note = Seed: LVVVGAGDV (KRAS G13D)
YVVLGLGDT

SEQ ID NO: 81574 - protein, 9 aa, synthetic construct
  source 1..9: note = Seed: LVVVGAGDV (KRAS G13D)
YVVLGLGDV

SEQ ID NO: 81575 - protein, 9 aa, synthetic construct
  source 1..9: note = Seed: LVVVGAGDV (KRAS G13D)
YVVLGMGDA

SEQ ID NO: 81576 - protein, 9 aa, synthetic construct
  source 1..9: note = Seed: LVVVGAGDV (KRAS G13D)
YVVLGMGDI

SEQ ID NO: 81577 - protein, 9 aa, synthetic construct
  source 1..9: note = Seed: LVVVGAGDV (KRAS G13D)
YVVLGMGDL

SEQ ID NO: 81578 - protein, 9 aa, synthetic construct
  source 1..9: note = Seed: LVVVGAGDV (KRAS G13D)
YVVLGMGDM

SEQ ID NO: 81579 - protein, 9 aa, synthetic construct
  source 1..9: note = Seed: LVVVGAGDV (KRAS G13D)
YVVLGMGDN

SEQ ID NO: 81580 - protein, 9 aa, synthetic construct
  source 1..9: note = Seed: LVVVGAGDV (KRAS G13D)
YVVLGMGDS

SEQ ID NO: 81581 - protein, 9 aa, synthetic construct
  source 1..9: note = Seed: LVVVGAGDV (KRAS G13D)
YVVLGMGDT

SEQ ID NO: 81582 - protein, 9 aa, synthetic construct
  source 1..9: note = Seed: LVVVGAGDV (KRAS G13D)
YVVLGMGDV

SEQ ID NO: 81583 - protein, 9 aa, synthetic construct
  source 1..9: note = Seed: LVVVGAGDV (KRAS G13D)
YVVLGNGDA

SEQ ID NO: 81584 - protein, 9 aa, synthetic construct
  source 1..9: note = Seed: LVVVGAGDV (KRAS G13D)
YVVLGNGDC

SEQ ID NO: 81585 - protein, 9 aa, synthetic construct
  source 1..9: note = Seed: LVVVGAGDV (KRAS G13D)
YVVLGNGDF

SEQ ID NO: 81586 - protein, 9 aa, synthetic construct
  source 1..9: note = Seed: LVVVGAGDV (KRAS G13D)
YVVLGNGDG

SEQ ID NO: 81587 - protein, 9 aa, synthetic construct
  source 1..9: note = Seed: LVVVGAGDV (KRAS G13D)
YVVLGNGDH

SEQ ID NO: 81588 - protein, 9 aa, synthetic construct
  source 1..9: note = Seed: LVVVGAGDV (KRAS G13D)
YVVLGNGDI

SEQ ID NO: 81589 - protein, 9 aa, synthetic construct
  source 1..9: note = Seed: LVVVGAGDV (KRAS G13D)
YVVLGNGDL

SEQ ID NO: 81590 - protein, 9 aa, synthetic construct
  source 1..9: note = Seed: LVVVGAGDV (KRAS G13D)
YVVLGNGDM

SEQ ID NO: 81591 - protein, 9 aa, synthetic construct
  source 1..9: note = Seed: LVVVGAGDV (KRAS G13D)
YVVLGNGDN

SEQ ID NO: 81592 - protein, 9 aa, synthetic construct
  source 1..9: note = Seed: LVVVGAGDV (KRAS G13D)
YVVLGNGDP

SEQ ID NO: 81593 - protein, 9 aa, synthetic construct
  source 1..9: note = Seed: LVVVGAGDV (KRAS G13D)
YVVLGNGDS

SEQ ID NO: 81594 - protein, 9 aa, synthetic construct
  source 1..9: note = Seed: LVVVGAGDV (KRAS G13D)
YVVLGNGDT

SEQ ID NO: 81595 - protein, 9 aa, synthetic construct
  source 1..9: note = Seed: LVVVGAGDV (KRAS G13D)
YVVLGNGDV

SEQ ID NO: 81596 - protein, 9 aa, synthetic construct
  source 1..9: note = Seed: LVVVGAGDV (KRAS G13D)
YVVLGNGDY

SEQ ID NO: 81597 - protein, 9 aa, synthetic construct
  source 1..9: note = Seed: LVVVGAGDV (KRAS G13D)
YVVLGPGDA

SEQ ID NO: 81598 - protein, 9 aa, synthetic construct
  source 1..9: note = Seed: LVVVGAGDV (KRAS G13D)
YVVLGPGDC

SEQ ID NO: 81599 - protein, 9 aa, synthetic construct
  source 1..9: note = Seed: LVVVGAGDV (KRAS G13D)
YVVLGPGDF

SEQ ID NO: 81600 - protein, 9 aa, synthetic construct
  source 1..9: note = Seed: LVVVGAGDV (KRAS G13D)
YVVLGPGDG

SEQ ID NO: 81601 - protein, 9 aa, synthetic construct
  source 1..9: note = Seed: LVVVGAGDV (KRAS G13D)
YVVLGPGDH

SEQ ID NO: 81602 - protein, 9 aa, synthetic construct
  source 1..9: note = Seed: LVVVGAGDV (KRAS G13D)
YVVLGPGDI

SEQ ID NO: 81603 - protein, 9 aa, synthetic construct
  source 1..9: note = Seed: LVVVGAGDV (KRAS G13D)
YVVLGPGDL

SEQ ID NO: 81604 - protein, 9 aa, synthetic construct
  source 1..9: note = Seed: LVVVGAGDV (KRAS G13D)
YVVLGPGDM

SEQ ID NO: 81605 - protein, 9 aa, synthetic construct
  source 1..9: note = Seed: LVVVGAGDV (KRAS G13D)
YVVLGPGDN

SEQ ID NO: 81606 - protein, 9 aa, synthetic construct
  source 1..9: note = Seed: LVVVGAGDV (KRAS G13D)
YVVLGPGDP

SEQ ID NO: 81607 - protein, 9 aa, synthetic construct
  source 1..9: note = Seed: LVVVGAGDV (KRAS G13D)
YVVLGPGDQ

SEQ ID NO: 81608 - protein, 9 aa, synthetic construct
  source 1..9: note = Seed: LVVVGAGDV (KRAS G13D)
YVVLGPGDS

SEQ ID NO: 81609 - protein, 9 aa, synthetic construct
  source 1..9: note = Seed: LVVVGAGDV (KRAS G13D)
YVVLGPGDT

SEQ ID NO: 81610 - protein, 9 aa, synthetic construct
  source 1..9: note = Seed: LVVVGAGDV (KRAS G13D)
YVVLGPGDV

SEQ ID NO: 81611 - protein, 9 aa, synthetic construct
  source 1..9: note = Seed: LVVVGAGDV (KRAS G13D)
YVVLGPGDY

SEQ ID NO: 81612 - protein, 9 aa, synthetic construct
  source 1..9: note = Seed: LVVVGAGDV (KRAS G13D)
YVVLGQGDA

SEQ ID NO: 81613 - protein, 9 aa, synthetic construct
  source 1..9: note = Seed: LVVVGAGDV (KRAS G13D)
YVVLGQGDI

SEQ ID NO: 81614 - protein, 9 aa, synthetic construct
  source 1..9: note = Seed: LVVVGAGDV (KRAS G13D)
YVVLGQGDL

SEQ ID NO: 81615 - protein, 9 aa, synthetic construct
  source 1..9: note = Seed: LVVVGAGDV (KRAS G13D)
YVVLGQGDM

SEQ ID NO: 81616 - protein, 9 aa, synthetic construct
  source 1..9: note = Seed: LVVVGAGDV (KRAS G13D)
YVVLGQGDV

SEQ ID NO: 81617 - protein, 9 aa, synthetic construct
  source 1..9: note = Seed: LVVVGAGDV (KRAS G13D)
YVVLGRGDA

SEQ ID NO: 81618 - protein, 9 aa, synthetic construct
  source 1..9: note = Seed: LVVVGAGDV (KRAS G13D)
YVVLGRGDG

SEQ ID NO: 81619 - protein, 9 aa, synthetic construct
  source 1..9: note = Seed: LVVVGAGDV (KRAS G13D)
YVVLGRGDH

SEQ ID NO: 81620 - protein, 9 aa, synthetic construct
  source 1..9: note = Seed: LVVVGAGDV (KRAS G13D)
YVVLGRGDI

SEQ ID NO: 81621 - protein, 9 aa, synthetic construct
  source 1..9: note = Seed: LVVVGAGDV (KRAS G13D)
YVVLGRGDL

SEQ ID NO: 81622 - protein, 9 aa, synthetic construct
  source 1..9: note = Seed: LVVVGAGDV (KRAS G13D)
YVVLGRGDM

SEQ ID NO: 81623 - protein, 9 aa, synthetic construct
  source 1..9: note = Seed: LVVVGAGDV (KRAS G13D)
YVVLGRGDN

SEQ ID NO: 81624 - protein, 9 aa, synthetic construct
  source 1..9: note = Seed: LVVVGAGDV (KRAS G13D)
YVVLGRGDP

SEQ ID NO: 81625 - protein, 9 aa, synthetic construct
  source 1..9: note = Seed: LVVVGAGDV (KRAS G13D)
YVVLGRGDQ

SEQ ID NO: 81626 - protein, 9 aa, synthetic construct
  source 1..9: note = Seed: LVVVGAGDV (KRAS G13D)
YVVLGRGDS

SEQ ID NO: 81627 - protein, 9 aa, synthetic construct
  source 1..9: note = Seed: LVVVGAGDV (KRAS G13D)
YVVLGRGDT

SEQ ID NO: 81628 - protein, 9 aa, synthetic construct
  source 1..9: note = Seed: LVVVGAGDV (KRAS G13D)
YVVLGRGDV

SEQ ID NO: 81629 - protein, 9 aa, synthetic construct
  source 1..9: note = Seed: LVVVGAGDV (KRAS G13D)
YVVLGSGDA

SEQ ID NO: 81630 - protein, 9 aa, synthetic construct
  source 1..9: note = Seed: LVVVGAGDV (KRAS G13D)
YVVLGSGDC

SEQ ID NO: 81631 - protein, 9 aa, synthetic construct
  source 1..9: note = Seed: LVVVGAGDV (KRAS G13D)
YVVLGSGDF

SEQ ID NO: 81632 - protein, 9 aa, synthetic construct
  source 1..9: note = Seed: LVVVGAGDV (KRAS G13D)
YVVLGSGDG

SEQ ID NO: 81633 - protein, 9 aa, synthetic construct
  source 1..9: note = Seed: LVVVGAGDV (KRAS G13D)
YVVLGSGDH

SEQ ID NO: 81634 - protein, 9 aa, synthetic construct
  source 1..9: note = Seed: LVVVGAGDV (KRAS G13D)
YVVLGSGDI

SEQ ID NO: 81635 - protein, 9 aa, synthetic construct
  source 1..9: note = Seed: LVVVGAGDV (KRAS G13D)
YVVLGSGDL

SEQ ID NO: 81636 - protein, 9 aa, synthetic construct
  source 1..9: note = Seed: LVVVGAGDV (KRAS G13D)
YVVLGSGDM

SEQ ID NO: 81637 - protein, 9 aa, synthetic construct
  source 1..9: note = Seed: LVVVGAGDV (KRAS G13D)
YVVLGSGDN

SEQ ID NO: 81638 - protein, 9 aa, synthetic construct
  source 1..9: note = Seed: LVVVGAGDV (KRAS G13D)
YVVLGSGDP

SEQ ID NO: 81639 - protein, 9 aa, synthetic construct
  source 1..9: note = Seed: LVVVGAGDV (KRAS G13D)
YVVLGSGDQ

SEQ ID NO: 81640 - protein, 9 aa, synthetic construct
  source 1..9: note = Seed: LVVVGAGDV (KRAS G13D)
YVVLGSGDR

SEQ ID NO: 81641 - protein, 9 aa, synthetic construct
  source 1..9: note = Seed: LVVVGAGDV (KRAS G13D)
YVVLGSGDS

SEQ ID NO: 81642 - protein, 9 aa, synthetic construct
  source 1..9: note = Seed: LVVVGAGDV (KRAS G13D)
YVVLGSGDT

SEQ ID NO: 81643 - protein, 9 aa, synthetic construct
  source 1..9: note = Seed: LVVVGAGDV (KRAS G13D)
YVVLGSGDV

SEQ ID NO: 81644 - protein, 9 aa, synthetic construct
  source 1..9: note = Seed: LVVVGAGDV (KRAS G13D)
YVVLGSGDY

SEQ ID NO: 81645 - protein, 9 aa, synthetic construct
  source 1..9: note = Seed: LVVVGAGDV (KRAS G13D)
YVVLGTGDA

SEQ ID NO: 81646 - protein, 9 aa, synthetic construct
  source 1..9: note = Seed: LVVVGAGDV (KRAS G13D)
YVVLGTGDC

SEQ ID NO: 81647 - protein, 9 aa, synthetic construct
  source 1..9: note = Seed: LVVVGAGDV (KRAS G13D)
YVVLGTGDF

SEQ ID NO: 81648 - protein, 9 aa, synthetic construct
  source 1..9: note = Seed: LVVVGAGDV (KRAS G13D)
YVVLGTGDG

SEQ ID NO: 81649 - protein, 9 aa, synthetic construct
  source 1..9: note = Seed: LVVVGAGDV (KRAS G13D)
YVVLGTGDH

SEQ ID NO: 81650 - protein, 9 aa, synthetic construct
  source 1..9: note = Seed: LVVVGAGDV (KRAS G13D)
YVVLGTGDI

SEQ ID NO: 81651 - protein, 9 aa, synthetic construct
  source 1..9: note = Seed: LVVVGAGDV (KRAS G13D)
YVVLGTGDL

SEQ ID NO: 81652 - protein, 9 aa, synthetic construct
  source 1..9: note = Seed: LVVVGAGDV (KRAS G13D)
YVVLGTGDM

SEQ ID NO: 81653 - protein, 9 aa, synthetic construct
  source 1..9: note = Seed: LVVVGAGDV (KRAS G13D)
YVVLGTGDN

SEQ ID NO: 81654 - protein, 9 aa, synthetic construct
  source 1..9: note = Seed: LVVVGAGDV (KRAS G13D)
YVVLGTGDQ

SEQ ID NO: 81655 - protein, 9 aa, synthetic construct
  source 1..9: note = Seed: LVVVGAGDV (KRAS G13D)
YVVLGTGDR

SEQ ID NO: 81656 - protein, 9 aa, synthetic construct
  source 1..9: note = Seed: LVVVGAGDV (KRAS G13D)
YVVLGTGDS

SEQ ID NO: 81657 - protein, 9 aa, synthetic construct
  source 1..9: note = Seed: LVVVGAGDV (KRAS G13D)
YVVLGTGDT

SEQ ID NO: 81658 - protein, 9 aa, synthetic construct
  source 1..9: note = Seed: LVVVGAGDV (KRAS G13D)
YVVLGTGDV

SEQ ID NO: 81659 - protein, 9 aa, synthetic construct
  source 1..9: note = Seed: LVVVGAGDV (KRAS G13D)
YVVLGTGDY

SEQ ID NO: 81660 - protein, 9 aa, synthetic construct
  source 1..9: note = Seed: LVVVGAGDV (KRAS G13D)
YVVLGVGDA

SEQ ID NO: 81661 - protein, 9 aa, synthetic construct
  source 1..9: note = Seed: LVVVGAGDV (KRAS G13D)
YVVLGVGDG

SEQ ID NO: 81662 - protein, 9 aa, synthetic construct
  source 1..9: note = Seed: LVVVGAGDV (KRAS G13D)
YVVLGVGDH

SEQ ID NO: 81663 - protein, 9 aa, synthetic construct
  source 1..9: note = Seed: LVVVGAGDV (KRAS G13D)
YVVLGVGDI

SEQ ID NO: 81664 - protein, 9 aa, synthetic construct
  source 1..9: note = Seed: LVVVGAGDV (KRAS G13D)
YVVLGVGDL

SEQ ID NO: 81665 - protein, 9 aa, synthetic construct
  source 1..9: note = Seed: LVVVGAGDV (KRAS G13D)
YVVLGVGDM

SEQ ID NO: 81666 - protein, 9 aa, synthetic construct
  source 1..9: note = Seed: LVVVGAGDV (KRAS G13D)
YVVLGVGDN

SEQ ID NO: 81667 - protein, 9 aa, synthetic construct
  source 1..9: note = Seed: LVVVGAGDV (KRAS G13D)
YVVLGVGDP

SEQ ID NO: 81668 - protein, 9 aa, synthetic construct
  source 1..9: note = Seed: LVVVGAGDV (KRAS G13D)
YVVLGVGDQ

SEQ ID NO: 81669 - protein, 9 aa, synthetic construct
  source 1..9: note = Seed: LVVVGAGDV (KRAS G13D)
YVVLGVGDS

SEQ ID NO: 81670 - protein, 9 aa, synthetic construct
  source 1..9: note = Seed: LVVVGAGDV (KRAS G13D)
YVVLGVGDT

SEQ ID NO: 81671 - protein, 9 aa, synthetic construct
  source 1..9: note = Seed: LVVVGAGDV (KRAS G13D)
YVVLGVGDV

SEQ ID NO: 81672 - protein, 9 aa, synthetic construct
  source 1..9: note = Seed: LVVVGAGDV (KRAS G13D)
YVVLGWGDL

SEQ ID NO: 81673 - protein, 9 aa, synthetic construct
  source 1..9: note = Seed: LVVVGAGDV (KRAS G13D)
YVVLGYGDL

SEQ ID NO: 81674 - protein, 9 aa, synthetic construct
  source 1..9: note = Seed: LVVVGAGDV (KRAS G13D)
YVVMGAGDA

SEQ ID NO: 81675 - protein, 9 aa, synthetic construct
  source 1..9: note = Seed: LVVVGAGDV (KRAS G13D)
YVVMGAGDC

SEQ ID NO: 81676 - protein, 9 aa, synthetic construct
  source 1..9: note = Seed: LVVVGAGDV (KRAS G13D)
YVVMGAGDF

SEQ ID NO: 81677 - protein, 9 aa, synthetic construct
  source 1..9: note = Seed: LVVVGAGDV (KRAS G13D)
YVVMGAGDG

SEQ ID NO: 81678 - protein, 9 aa, synthetic construct
  source 1..9: note = Seed: LVVVGAGDV (KRAS G13D)
YVVMGAGDH

SEQ ID NO: 81679 - protein, 9 aa, synthetic construct
  source 1..9: note = Seed: LVVVGAGDV (KRAS G13D)
YVVMGAGDI

SEQ ID NO: 81680 - protein, 9 aa, synthetic construct
  source 1..9: note = Seed: LVVVGAGDV (KRAS G13D)
YVVMGAGDK

SEQ ID NO: 81681 - protein, 9 aa, synthetic construct
  source 1..9: note = Seed: LVVVGAGDV (KRAS G13D)
YVVMGAGDL

SEQ ID NO: 81682 - protein, 9 aa, synthetic construct
  source 1..9: note = Seed: LVVVGAGDV (KRAS G13D)
YVVMGAGDM

SEQ ID NO: 81683 - protein, 9 aa, synthetic construct
  source 1..9: note = Seed: LVVVGAGDV (KRAS G13D)
YVVMGAGDN

SEQ ID NO: 81684 - protein, 9 aa, synthetic construct
  source 1..9: note = Seed: LVVVGAGDV (KRAS G13D)
YVVMGAGDP

SEQ ID NO: 81685 - protein, 9 aa, synthetic construct
  source 1..9: note = Seed: LVVVGAGDV (KRAS G13D)
YVVMGAGDQ

SEQ ID NO: 81686 - protein, 9 aa, synthetic construct
  source 1..9: note = Seed: LVVVGAGDV (KRAS G13D)
YVVMGAGDR

SEQ ID NO: 81687 - protein, 9 aa, synthetic construct
  source 1..9: note = Seed: LVVVGAGDV (KRAS G13D)
YVVMGAGDS

SEQ ID NO: 81688 - protein, 9 aa, synthetic construct
  source 1..9: note = Seed: LVVVGAGDV (KRAS G13D)
YVVMGAGDT

SEQ ID NO: 81689 - protein, 9 aa, synthetic construct
  source 1..9: note = Seed: LVVVGAGDV (KRAS G13D)
YVVMGAGDV

SEQ ID NO: 81690 - protein, 9 aa, synthetic construct
  source 1..9: note = Seed: LVVVGAGDV (KRAS G13D)
YVVMGAGDW

SEQ ID NO: 81691 - protein, 9 aa, synthetic construct
  source 1..9: note = Seed: LVVVGAGDV (KRAS G13D)
YVVMGAGDY

SEQ ID NO: 81692 - protein, 9 aa, synthetic construct
  source 1..9: note = Seed: LVVVGAGDV (KRAS G13D)
YVVMGCGDI

SEQ ID NO: 81693 - protein, 9 aa, synthetic construct
  source 1..9: note = Seed: LVVVGAGDV (KRAS G13D)
YVVMGCGDL

SEQ ID NO: 81694 - protein, 9 aa, synthetic construct
  source 1..9: note = Seed: LVVVGAGDV (KRAS G13D)
YVVMGCGDV

SEQ ID NO: 81695 - protein, 9 aa, synthetic construct
  source 1..9: note = Seed: LVVVGAGDV (KRAS G13D)
YVVMGDGDL

SEQ ID NO: 81696 - protein, 9 aa, synthetic construct
  source 1..9: note = Seed: LVVVGAGDV (KRAS G13D)
YVVMGEGDL

SEQ ID NO: 81697 - protein, 9 aa, synthetic construct
  source 1..9: note = Seed: LVVVGAGDV (KRAS G13D)
YVVMGFGDL

SEQ ID NO: 81698 - protein, 9 aa, synthetic construct
  source 1..9: note = Seed: LVVVGAGDV (KRAS G13D)
YVVMGGGDA

SEQ ID NO: 81699 - protein, 9 aa, synthetic construct
  source 1..9: note = Seed: LVVVGAGDV (KRAS G13D)
YVVMGGGDC

SEQ ID NO: 81700 - protein, 9 aa, synthetic construct
  source 1..9: note = Seed: LVVVGAGDV (KRAS G13D)
YVVMGGGDF

SEQ ID NO: 81701 - protein, 9 aa, synthetic construct
  source 1..9: note = Seed: LVVVGAGDV (KRAS G13D)
YVVMGGGDG

SEQ ID NO: 81702 - protein, 9 aa, synthetic construct
  source 1..9: note = Seed: LVVVGAGDV (KRAS G13D)
YVVMGGGDH

SEQ ID NO: 81703 - protein, 9 aa, synthetic construct
  source 1..9: note = Seed: LVVVGAGDV (KRAS G13D)
YVVMGGGDI

SEQ ID NO: 81704 - protein, 9 aa, synthetic construct
  source 1..9: note = Seed: LVVVGAGDV (KRAS G13D)
YVVMGGGDL

SEQ ID NO: 81705 - protein, 9 aa, synthetic construct
  source 1..9: note = Seed: LVVVGAGDV (KRAS G13D)
YVVMGGGDM

SEQ ID NO: 81706 - protein, 9 aa, synthetic construct
  source 1..9: note = Seed: LVVVGAGDV (KRAS G13D)
YVVMGGGDN

SEQ ID NO: 81707 - protein, 9 aa, synthetic construct
  source 1..9: note = Seed: LVVVGAGDV (KRAS G13D)
YVVMGGGDP

SEQ ID NO: 81708 - protein, 9 aa, synthetic construct
  source 1..9: note = Seed: LVVVGAGDV (KRAS G13D)
YVVMGGGDQ

SEQ ID NO: 81709 - protein, 9 aa, synthetic construct
  source 1..9: note = Seed: LVVVGAGDV (KRAS G13D)
YVVMGGGDS

SEQ ID NO: 81710 - protein, 9 aa, synthetic construct
  source 1..9: note = Seed: LVVVGAGDV (KRAS G13D)
YVVMGGGDT

SEQ ID NO: 81711 - protein, 9 aa, synthetic construct
  source 1..9: note = Seed: LVVVGAGDV (KRAS G13D)
YVVMGGGDV

SEQ ID NO: 81712 - protein, 9 aa, synthetic construct
  source 1..9: note = Seed: LVVVGAGDV (KRAS G13D)
YVVMGGGDY

SEQ ID NO: 81713 - protein, 9 aa, synthetic construct
  source 1..9: note = Seed: LVVVGAGDV (KRAS G13D)
YVVMGHGDA

SEQ ID NO: 81714 - protein, 9 aa, synthetic construct
  source 1..9: note = Seed: LVVVGAGDV (KRAS G13D)
YVVMGHGDI

SEQ ID NO: 81715 - protein, 9 aa, synthetic construct
  source 1..9: note = Seed: LVVVGAGDV (KRAS G13D)
YVVMGHGDL

SEQ ID NO: 81716 - protein, 9 aa, synthetic construct
  source 1..9: note = Seed: LVVVGAGDV (KRAS G13D)
YVVMGHGDM

SEQ ID NO: 81717 - protein, 9 aa, synthetic construct
  source 1..9: note = Seed: LVVVGAGDV (KRAS G13D)
YVVMGHGDV

SEQ ID NO: 81718 - protein, 9 aa, synthetic construct
  source 1..9: note = Seed: LVVVGAGDV (KRAS G13D)
YVVMGIGDA

SEQ ID NO: 81719 - protein, 9 aa, synthetic construct
  source 1..9: note = Seed: LVVVGAGDV (KRAS G13D)
YVVMGIGDG

SEQ ID NO: 81720 - protein, 9 aa, synthetic construct
  source 1..9: note = Seed: LVVVGAGDV (KRAS G13D)
YVVMGIGDH

SEQ ID NO: 81721 - protein, 9 aa, synthetic construct
  source 1..9: note = Seed: LVVVGAGDV (KRAS G13D)
YVVMGIGDI

SEQ ID NO: 81722 - protein, 9 aa, synthetic construct
  source 1..9: note = Seed: LVVVGAGDV (KRAS G13D)
YVVMGIGDL

SEQ ID NO: 81723 - protein, 9 aa, synthetic construct
  source 1..9: note = Seed: LVVVGAGDV (KRAS G13D)
YVVMGIGDM

SEQ ID NO: 81724 - protein, 9 aa, synthetic construct
  source 1..9: note = Seed: LVVVGAGDV (KRAS G13D)
YVVMGIGDN

SEQ ID NO: 81725 - protein, 9 aa, synthetic construct
  source 1..9: note = Seed: LVVVGAGDV (KRAS G13D)
YVVMGIGDQ

SEQ ID NO: 81726 - protein, 9 aa, synthetic construct
  source 1..9: note = Seed: LVVVGAGDV (KRAS G13D)
YVVMGIGDS

SEQ ID NO: 81727 - protein, 9 aa, synthetic construct
  source 1..9: note = Seed: LVVVGAGDV (KRAS G13D)
YVVMGIGDT

SEQ ID NO: 81728 - protein, 9 aa, synthetic construct
  source 1..9: note = Seed: LVVVGAGDV (KRAS G13D)
YVVMGIGDV

SEQ ID NO: 81729 - protein, 9 aa, synthetic construct
  source 1..9: note = Seed: LVVVGAGDV (KRAS G13D)
YVVMGKGDA

SEQ ID NO: 81730 - protein, 9 aa, synthetic construct
  source 1..9: note = Seed: LVVVGAGDV (KRAS G13D)
YVVMGKGDH

SEQ ID NO: 81731 - protein, 9 aa, synthetic construct
  source 1..9: note = Seed: LVVVGAGDV (KRAS G13D)
YVVMGKGDI

SEQ ID NO: 81732 - protein, 9 aa, synthetic construct
  source 1..9: note = Seed: LVVVGAGDV (KRAS G13D)
YVVMGKGDL

SEQ ID NO: 81733 - protein, 9 aa, synthetic construct
  source 1..9: note = Seed: LVVVGAGDV (KRAS G13D)
YVVMGKGDM

SEQ ID NO: 81734 - protein, 9 aa, synthetic construct
  source 1..9: note = Seed: LVVVGAGDV (KRAS G13D)
YVVMGKGDN

SEQ ID NO: 81735 - protein, 9 aa, synthetic construct
  source 1..9: note = Seed: LVVVGAGDV (KRAS G13D)
YVVMGKGDS

SEQ ID NO: 81736 - protein, 9 aa, synthetic construct
  source 1..9: note = Seed: LVVVGAGDV (KRAS G13D)
YVVMGKGDT

SEQ ID NO: 81737 - protein, 9 aa, synthetic construct
  source 1..9: note = Seed: LVVVGAGDV (KRAS G13D)
YVVMGKGDV

SEQ ID NO: 81738 - protein, 9 aa, synthetic construct
  source 1..9: note = Seed: LVVVGAGDV (KRAS G13D)
YVVMGLGDA

SEQ ID NO: 81739 - protein, 9 aa, synthetic construct
  source 1..9: note = Seed: LVVVGAGDV (KRAS G13D)
YVVMGLGDI

SEQ ID NO: 81740 - protein, 9 aa, synthetic construct
  source 1..9: note = Seed: LVVVGAGDV (KRAS G13D)
YVVMGLGDL

SEQ ID NO: 81741 - protein, 9 aa, synthetic construct
  source 1..9: note = Seed: LVVVGAGDV (KRAS G13D)
YVVMGLGDM

SEQ ID NO: 81742 - protein, 9 aa, synthetic construct
  source 1..9: note = Seed: LVVVGAGDV (KRAS G13D)
YVVMGLGDN

SEQ ID NO: 81743 - protein, 9 aa, synthetic construct
  source 1..9: note = Seed: LVVVGAGDV (KRAS G13D)
YVVMGLGDS

SEQ ID NO: 81744 - protein, 9 aa, synthetic construct
  source 1..9: note = Seed: LVVVGAGDV (KRAS G13D)
YVVMGLGDT

SEQ ID NO: 81745 - protein, 9 aa, synthetic construct
  source 1..9: note = Seed: LVVVGAGDV (KRAS G13D)
YVVMGLGDV

SEQ ID NO: 81746 - protein, 9 aa, synthetic construct
  source 1..9: note = Seed: LVVVGAGDV (KRAS G13D)
YVVMGMGDA

SEQ ID NO: 81747 - protein, 9 aa, synthetic construct
  source 1..9: note = Seed: LVVVGAGDV (KRAS G13D)
YVVMGMGDI

SEQ ID NO: 81748 - protein, 9 aa, synthetic construct
  source 1..9: note = Seed: LVVVGAGDV (KRAS G13D)
YVVMGMGDL

SEQ ID NO: 81749 - protein, 9 aa, synthetic construct
  source 1..9: note = Seed: LVVVGAGDV (KRAS G13D)
YVVMGMGDM

SEQ ID NO: 81750 - protein, 9 aa, synthetic construct
  source 1..9: note = Seed: LVVVGAGDV (KRAS G13D)
YVVMGMGDN

SEQ ID NO: 81751 - protein, 9 aa, synthetic construct
  source 1..9: note = Seed: LVVVGAGDV (KRAS G13D)
YVVMGMGDS

SEQ ID NO: 81752 - protein, 9 aa, synthetic construct
  source 1..9: note = Seed: LVVVGAGDV (KRAS G13D)
YVVMGMGDT

SEQ ID NO: 81753 - protein, 9 aa, synthetic construct
  source 1..9: note = Seed: LVVVGAGDV (KRAS G13D)
YVVMGMGDV

SEQ ID NO: 81754 - protein, 9 aa, synthetic construct
  source 1..9: note = Seed: LVVVGAGDV (KRAS G13D)
YVVMGNGDA

SEQ ID NO: 81755 - protein, 9 aa, synthetic construct
  source 1..9: note = Seed: LVVVGAGDV (KRAS G13D)
YVVMGNGDC

SEQ ID NO: 81756 - protein, 9 aa, synthetic construct
  source 1..9: note = Seed: LVVVGAGDV (KRAS G13D)
YVVMGNGDF

SEQ ID NO: 81757 - protein, 9 aa, synthetic construct
  source 1..9: note = Seed: LVVVGAGDV (KRAS G13D)
YVVMGNGDG

SEQ ID NO: 81758 - protein, 9 aa, synthetic construct
  source 1..9: note = Seed: LVVVGAGDV (KRAS G13D)
YVVMGNGDI

SEQ ID NO: 81759 - protein, 9 aa, synthetic construct
  source 1..9: note = Seed: LVVVGAGDV (KRAS G13D)
YVVMGNGDL

SEQ ID NO: 81760 - protein, 9 aa, synthetic construct
  source 1..9: note = Seed: LVVVGAGDV (KRAS G13D)
YVVMGNGDM

SEQ ID NO: 81761 - protein, 9 aa, synthetic construct
  source 1..9: note = Seed: LVVVGAGDV (KRAS G13D)
YVVMGNGDN

SEQ ID NO: 81762 - protein, 9 aa, synthetic construct
  source 1..9: note = Seed: LVVVGAGDV (KRAS G13D)
YVVMGNGDS

SEQ ID NO: 81763 - protein, 9 aa, synthetic construct
  source 1..9: note = Seed: LVVVGAGDV (KRAS G13D)
YVVMGNGDT

SEQ ID NO: 81764 - protein, 9 aa, synthetic construct
  source 1..9: note = Seed: LVVVGAGDV (KRAS G13D)
YVVMGNGDV

SEQ ID NO: 81765 - protein, 9 aa, synthetic construct
  source 1..9: note = Seed: LVVVGAGDV (KRAS G13D)
YVVMGPGDA

SEQ ID NO: 81766 - protein, 9 aa, synthetic construct
  source 1..9: note = Seed: LVVVGAGDV (KRAS G13D)
YVVMGPGDC

SEQ ID NO: 81767 - protein, 9 aa, synthetic construct
  source 1..9: note = Seed: LVVVGAGDV (KRAS G13D)
YVVMGPGDF

SEQ ID NO: 81768 - protein, 9 aa, synthetic construct
  source 1..9: note = Seed: LVVVGAGDV (KRAS G13D)
YVVMGPGDG

SEQ ID NO: 81769 - protein, 9 aa, synthetic construct
  source 1..9: note = Seed: LVVVGAGDV (KRAS G13D)
YVVMGPGDH

SEQ ID NO: 81770 - protein, 9 aa, synthetic construct
  source 1..9: note = Seed: LVVVGAGDV (KRAS G13D)
YVVMGPGDI

SEQ ID NO: 81771 - protein, 9 aa, synthetic construct
  source 1..9: note = Seed: LVVVGAGDV (KRAS G13D)
YVVMGPGDL

SEQ ID NO: 81772 - protein, 9 aa, synthetic construct
  source 1..9: note = Seed: LVVVGAGDV (KRAS G13D)
YVVMGPGDM

SEQ ID NO: 81773 - protein, 9 aa, synthetic construct
  source 1..9: note = Seed: LVVVGAGDV (KRAS G13D)
YVVMGPGDN

SEQ ID NO: 81774 - protein, 9 aa, synthetic construct
  source 1..9: note = Seed: LVVVGAGDV (KRAS G13D)
YVVMGPGDQ

SEQ ID NO: 81775 - protein, 9 aa, synthetic construct
  source 1..9: note = Seed: LVVVGAGDV (KRAS G13D)
YVVMGPGDS

SEQ ID NO: 81776 - protein, 9 aa, synthetic construct
  source 1..9: note = Seed: LVVVGAGDV (KRAS G13D)
YVVMGPGDT

SEQ ID NO: 81777 - protein, 9 aa, synthetic construct
  source 1..9: note = Seed: LVVVGAGDV (KRAS G13D)
YVVMGPGDV

SEQ ID NO: 81778 - protein, 9 aa, synthetic construct
  source 1..9: note = Seed: LVVVGAGDV (KRAS G13D)
YVVMGQGDA

SEQ ID NO: 81779 - protein, 9 aa, synthetic construct
  source 1..9: note = Seed: LVVVGAGDV (KRAS G13D)
YVVMGQGDI

SEQ ID NO: 81780 - protein, 9 aa, synthetic construct
  source 1..9: note = Seed: LVVVGAGDV (KRAS G13D)
YVVMGQGDL

SEQ ID NO: 81781 - protein, 9 aa, synthetic construct
  source 1..9: note = Seed: LVVVGAGDV (KRAS G13D)
YVVMGQGDM

SEQ ID NO: 81782 - protein, 9 aa, synthetic construct
  source 1..9: note = Seed: LVVVGAGDV (KRAS G13D)
YVVMGQGDV

SEQ ID NO: 81783 - protein, 9 aa, synthetic construct
  source 1..9: note = Seed: LVVVGAGDV (KRAS G13D)
YVVMGRGDA

SEQ ID NO: 81784 - protein, 9 aa, synthetic construct
  source 1..9: note = Seed: LVVVGAGDV (KRAS G13D)
YVVMGRGDG

SEQ ID NO: 81785 - protein, 9 aa, synthetic construct
  source 1..9: note = Seed: LVVVGAGDV (KRAS G13D)
YVVMGRGDH

SEQ ID NO: 81786 - protein, 9 aa, synthetic construct
  source 1..9: note = Seed: LVVVGAGDV (KRAS G13D)
YVVMGRGDI

SEQ ID NO: 81787 - protein, 9 aa, synthetic construct
  source 1..9: note = Seed: LVVVGAGDV (KRAS G13D)
YVVMGRGDK

SEQ ID NO: 81788 - protein, 9 aa, synthetic construct
  source 1..9: note = Seed: LVVVGAGDV (KRAS G13D)
YVVMGRGDL

SEQ ID NO: 81789 - protein, 9 aa, synthetic construct
  source 1..9: note = Seed: LVVVGAGDV (KRAS G13D)
YVVMGRGDM

SEQ ID NO: 81790 - protein, 9 aa, synthetic construct
  source 1..9: note = Seed: LVVVGAGDV (KRAS G13D)
YVVMGRGDN

SEQ ID NO: 81791 - protein, 9 aa, synthetic construct
  source 1..9: note = Seed: LVVVGAGDV (KRAS G13D)
YVVMGRGDP

SEQ ID NO: 81792 - protein, 9 aa, synthetic construct
  source 1..9: note = Seed: LVVVGAGDV (KRAS G13D)
YVVMGRGDQ

SEQ ID NO: 81793 - protein, 9 aa, synthetic construct
  source 1..9: note = Seed: LVVVGAGDV (KRAS G13D)
YVVMGRGDS

SEQ ID NO: 81794 - protein, 9 aa, synthetic construct
  source 1..9: note = Seed: LVVVGAGDV (KRAS G13D)
YVVMGRGDT

SEQ ID NO: 81795 - protein, 9 aa, synthetic construct
  source 1..9: note = Seed: LVVVGAGDV (KRAS G13D)
YVVMGRGDV

SEQ ID NO: 81796 - protein, 9 aa, synthetic construct
  source 1..9: note = Seed: LVVVGAGDV (KRAS G13D)
YVVMGSGDA

SEQ ID NO: 81797 - protein, 9 aa, synthetic construct
  source 1..9: note = Seed: LVVVGAGDV (KRAS G13D)
YVVMGSGDC

SEQ ID NO: 81798 - protein, 9 aa, synthetic construct
  source 1..9: note = Seed: LVVVGAGDV (KRAS G13D)
YVVMGSGDF

SEQ ID NO: 81799 - protein, 9 aa, synthetic construct
  source 1..9: note = Seed: LVVVGAGDV (KRAS G13D)
YVVMGSGDG

SEQ ID NO: 81800 - protein, 9 aa, synthetic construct
  source 1..9: note = Seed: LVVVGAGDV (KRAS G13D)
YVVMGSGDH

SEQ ID NO: 81801 - protein, 9 aa, synthetic construct
  source 1..9: note = Seed: LVVVGAGDV (KRAS G13D)
YVVMGSGDI

SEQ ID NO: 81802 - protein, 9 aa, synthetic construct
  source 1..9: note = Seed: LVVVGAGDV (KRAS G13D)
YVVMGSGDL

SEQ ID NO: 81803 - protein, 9 aa, synthetic construct
  source 1..9: note = Seed: LVVVGAGDV (KRAS G13D)
YVVMGSGDM

SEQ ID NO: 81804 - protein, 9 aa, synthetic construct
  source 1..9: note = Seed: LVVVGAGDV (KRAS G13D)
YVVMGSGDN

SEQ ID NO: 81805 - protein, 9 aa, synthetic construct
  source 1..9: note = Seed: LVVVGAGDV (KRAS G13D)
YVVMGSGDP

SEQ ID NO: 81806 - protein, 9 aa, synthetic construct
  source 1..9: note = Seed: LVVVGAGDV (KRAS G13D)
YVVMGSGDQ

SEQ ID NO: 81807 - protein, 9 aa, synthetic construct
  source 1..9: note = Seed: LVVVGAGDV (KRAS G13D)
YVVMGSGDR

SEQ ID NO: 81808 - protein, 9 aa, synthetic construct
  source 1..9: note = Seed: LVVVGAGDV (KRAS G13D)
YVVMGSGDS

SEQ ID NO: 81809 - protein, 9 aa, synthetic construct
  source 1..9: note = Seed: LVVVGAGDV (KRAS G13D)
YVVMGSGDT

SEQ ID NO: 81810 - protein, 9 aa, synthetic construct
  source 1..9: note = Seed: LVVVGAGDV (KRAS G13D)
YVVMGSGDV

SEQ ID NO: 81811 - protein, 9 aa, synthetic construct
  source 1..9: note = Seed: LVVVGAGDV (KRAS G13D)
YVVMGSGDW

SEQ ID NO: 81812 - protein, 9 aa, synthetic construct
  source 1..9: note = Seed: LVVVGAGDV (KRAS G13D)
YVVMGSGDY

SEQ ID NO: 81813 - protein, 9 aa, synthetic construct
  source 1..9: note = Seed: LVVVGAGDV (KRAS G13D)
YVVMGTGDA

SEQ ID NO: 81814 - protein, 9 aa, synthetic construct
  source 1..9: note = Seed: LVVVGAGDV (KRAS G13D)
YVVMGTGDC

SEQ ID NO: 81815 - protein, 9 aa, synthetic construct
  source 1..9: note = Seed: LVVVGAGDV (KRAS G13D)
YVVMGTGDF

SEQ ID NO: 81816 - protein, 9 aa, synthetic construct
  source 1..9: note = Seed: LVVVGAGDV (KRAS G13D)
YVVMGTGDG

SEQ ID NO: 81817 - protein, 9 aa, synthetic construct
  source 1..9: note = Seed: LVVVGAGDV (KRAS G13D)
YVVMGTGDH

SEQ ID NO: 81818 - protein, 9 aa, synthetic construct
  source 1..9: note = Seed: LVVVGAGDV (KRAS G13D)
YVVMGTGDI

SEQ ID NO: 81819 - protein, 9 aa, synthetic construct
  source 1..9: note = Seed: LVVVGAGDV (KRAS G13D)
YVVMGTGDL

SEQ ID NO: 81820 - protein, 9 aa, synthetic construct
  source 1..9: note = Seed: LVVVGAGDV (KRAS G13D)
YVVMGTGDM

SEQ ID NO: 81821 - protein, 9 aa, synthetic construct
  source 1..9: note = Seed: LVVVGAGDV (KRAS G13D)
YVVMGTGDN

SEQ ID NO: 81822 - protein, 9 aa, synthetic construct
  source 1..9: note = Seed: LVVVGAGDV (KRAS G13D)
YVVMGTGDQ

SEQ ID NO: 81823 - protein, 9 aa, synthetic construct
  source 1..9: note = Seed: LVVVGAGDV (KRAS G13D)
YVVMGTGDR

SEQ ID NO: 81824 - protein, 9 aa, synthetic construct
  source 1..9: note = Seed: LVVVGAGDV (KRAS G13D)
YVVMGTGDS

SEQ ID NO: 81825 - protein, 9 aa, synthetic construct
  source 1..9: note = Seed: LVVVGAGDV (KRAS G13D)
YVVMGTGDT

SEQ ID NO: 81826 - protein, 9 aa, synthetic construct
  source 1..9: note = Seed: LVVVGAGDV (KRAS G13D)
YVVMGTGDV

SEQ ID NO: 81827 - protein, 9 aa, synthetic construct
  source 1..9: note = Seed: LVVVGAGDV (KRAS G13D)
YVVMGTGDY

SEQ ID NO: 81828 - protein, 9 aa, synthetic construct
  source 1..9: note = Seed: LVVVGAGDV (KRAS G13D)
YVVMGVGDA

SEQ ID NO: 81829 - protein, 9 aa, synthetic construct
  source 1..9: note = Seed: LVVVGAGDV (KRAS G13D)
YVVMGVGDF

SEQ ID NO: 81830 - protein, 9 aa, synthetic construct
  source 1..9: note = Seed: LVVVGAGDV (KRAS G13D)
YVVMGVGDG

SEQ ID NO: 81831 - protein, 9 aa, synthetic construct
  source 1..9: note = Seed: LVVVGAGDV (KRAS G13D)
YVVMGVGDH

SEQ ID NO: 81832 - protein, 9 aa, synthetic construct
  source 1..9: note = Seed: LVVVGAGDV (KRAS G13D)
YVVMGVGDI

SEQ ID NO: 81833 - protein, 9 aa, synthetic construct
  source 1..9: note = Seed: LVVVGAGDV (KRAS G13D)
YVVMGVGDL

SEQ ID NO: 81834 - protein, 9 aa, synthetic construct
  source 1..9: note = Seed: LVVVGAGDV (KRAS G13D)
YVVMGVGDM

SEQ ID NO: 81835 - protein, 9 aa, synthetic construct
  source 1..9: note = Seed: LVVVGAGDV (KRAS G13D)
YVVMGVGDN

SEQ ID NO: 81836 - protein, 9 aa, synthetic construct
  source 1..9: note = Seed: LVVVGAGDV (KRAS G13D)
YVVMGVGDP

SEQ ID NO: 81837 - protein, 9 aa, synthetic construct
  source 1..9: note = Seed: LVVVGAGDV (KRAS G13D)
YVVMGVGDQ

SEQ ID NO: 81838 - protein, 9 aa, synthetic construct
  source 1..9: note = Seed: LVVVGAGDV (KRAS G13D)
YVVMGVGDS

SEQ ID NO: 81839 - protein, 9 aa, synthetic construct
  source 1..9: note = Seed: LVVVGAGDV (KRAS G13D)
YVVMGVGDT

SEQ ID NO: 81840 - protein, 9 aa, synthetic construct
  source 1..9: note = Seed: LVVVGAGDV (KRAS G13D)
YVVMGVGDV

SEQ ID NO: 81841 - protein, 9 aa, synthetic construct
  source 1..9: note = Seed: LVVVGAGDV (KRAS G13D)
YVVMGWGDL

SEQ ID NO: 81842 - protein, 9 aa, synthetic construct
  source 1..9: note = Seed: LVVVGAGDV (KRAS G13D)
YVVMGYGDL

SEQ ID NO: 81843 - protein, 9 aa, synthetic construct
  source 1..9: note = Seed: LVVVGAGDV (KRAS G13D)
YVVNGAGDA

SEQ ID NO: 81844 - protein, 9 aa, synthetic construct
  source 1..9: note = Seed: LVVVGAGDV (KRAS G13D)
YVVNGAGDF

SEQ ID NO: 81845 - protein, 9 aa, synthetic construct
  source 1..9: note = Seed: LVVVGAGDV (KRAS G13D)
YVVNGAGDI

SEQ ID NO: 81846 - protein, 9 aa, synthetic construct
  source 1..9: note = Seed: LVVVGAGDV (KRAS G13D)
YVVNGAGDL

SEQ ID NO: 81847 - protein, 9 aa, synthetic construct
  source 1..9: note = Seed: LVVVGAGDV (KRAS G13D)
YVVNGAGDM

SEQ ID NO: 81848 - protein, 9 aa, synthetic construct
  source 1..9: note = Seed: LVVVGAGDV (KRAS G13D)
YVVNGAGDV

SEQ ID NO: 81849 - protein, 9 aa, synthetic construct
  source 1..9: note = Seed: LVVVGAGDV (KRAS G13D)
YVVNGAGDY

SEQ ID NO: 81850 - protein, 9 aa, synthetic construct
  source 1..9: note = Seed: LVVVGAGDV (KRAS G13D)
YVVNGGGDI

SEQ ID NO: 81851 - protein, 9 aa, synthetic construct
  source 1..9: note = Seed: LVVVGAGDV (KRAS G13D)
YVVNGGGDL

SEQ ID NO: 81852 - protein, 9 aa, synthetic construct
  source 1..9: note = Seed: LVVVGAGDV (KRAS G13D)
YVVNGGGDV

SEQ ID NO: 81853 - protein, 9 aa, synthetic construct
  source 1..9: note = Seed: LVVVGAGDV (KRAS G13D)
YVVNGIGDF

SEQ ID NO: 81854 - protein, 9 aa, synthetic construct
  source 1..9: note = Seed: LVVVGAGDV (KRAS G13D)
YVVNGIGDI

SEQ ID NO: 81855 - protein, 9 aa, synthetic construct
  source 1..9: note = Seed: LVVVGAGDV (KRAS G13D)
YVVNGIGDL

SEQ ID NO: 81856 - protein, 9 aa, synthetic construct
  source 1..9: note = Seed: LVVVGAGDV (KRAS G13D)
YVVNGIGDM

SEQ ID NO: 81857 - protein, 9 aa, synthetic construct
  source 1..9: note = Seed: LVVVGAGDV (KRAS G13D)
YVVNGIGDV

SEQ ID NO: 81858 - protein, 9 aa, synthetic construct
  source 1..9: note = Seed: LVVVGAGDV (KRAS G13D)
YVVNGLGDI

SEQ ID NO: 81859 - protein, 9 aa, synthetic construct
  source 1..9: note = Seed: LVVVGAGDV (KRAS G13D)
YVVNGNGDF

SEQ ID NO: 81860 - protein, 9 aa, synthetic construct
  source 1..9: note = Seed: LVVVGAGDV (KRAS G13D)
YVVNGNGDI

SEQ ID NO: 81861 - protein, 9 aa, synthetic construct
  source 1..9: note = Seed: LVVVGAGDV (KRAS G13D)
YVVNGNGDL

SEQ ID NO: 81862 - protein, 9 aa, synthetic construct
  source 1..9: note = Seed: LVVVGAGDV (KRAS G13D)
YVVNGNGDM

SEQ ID NO: 81863 - protein, 9 aa, synthetic construct
  source 1..9: note = Seed: LVVVGAGDV (KRAS G13D)
YVVNGNGDV

SEQ ID NO: 81864 - protein, 9 aa, synthetic construct
  source 1..9: note = Seed: LVVVGAGDV (KRAS G13D)
YVVNGNGDY

SEQ ID NO: 81865 - protein, 9 aa, synthetic construct
  source 1..9: note = Seed: LVVVGAGDV (KRAS G13D)
YVVNGPGDI

SEQ ID NO: 81866 - protein, 9 aa, synthetic construct
  source 1..9: note = Seed: LVVVGAGDV (KRAS G13D)
YVVNGPGDL

SEQ ID NO: 81867 - protein, 9 aa, synthetic construct
  source 1..9: note = Seed: LVVVGAGDV (KRAS G13D)
YVVNGPGDV

SEQ ID NO: 81868 - protein, 9 aa, synthetic construct
  source 1..9: note = Seed: LVVVGAGDV (KRAS G13D)
YVVNGSGDF

SEQ ID NO: 81869 - protein, 9 aa, synthetic construct
  source 1..9: note = Seed: LVVVGAGDV (KRAS G13D)
YVVNGSGDI

SEQ ID NO: 81870 - protein, 9 aa, synthetic construct
  source 1..9: note = Seed: LVVVGAGDV (KRAS G13D)
YVVNGSGDL

SEQ ID NO: 81871 - protein, 9 aa, synthetic construct
  source 1..9: note = Seed: LVVVGAGDV (KRAS G13D)
YVVNGSGDM

SEQ ID NO: 81872 - protein, 9 aa, synthetic construct
  source 1..9: note = Seed: LVVVGAGDV (KRAS G13D)
YVVNGSGDV

SEQ ID NO: 81873 - protein, 9 aa, synthetic construct
  source 1..9: note = Seed: LVVVGAGDV (KRAS G13D)
YVVNGSGDY

SEQ ID NO: 81874 - protein, 9 aa, synthetic construct
  source 1..9: note = Seed: LVVVGAGDV (KRAS G13D)
YVVNGTGDF

SEQ ID NO: 81875 - protein, 9 aa, synthetic construct
  source 1..9: note = Seed: LVVVGAGDV (KRAS G13D)
YVVNGTGDI

SEQ ID NO: 81876 - protein, 9 aa, synthetic construct
  source 1..9: note = Seed: LVVVGAGDV (KRAS G13D)
YVVNGTGDL

SEQ ID NO: 81877 - protein, 9 aa, synthetic construct
  source 1..9: note = Seed: LVVVGAGDV (KRAS G13D)
YVVNGTGDV

SEQ ID NO: 81878 - protein, 9 aa, synthetic construct
  source 1..9: note = Seed: LVVVGAGDV (KRAS G13D)
YVVNGVGDF

SEQ ID NO: 81879 - protein, 9 aa, synthetic construct
  source 1..9: note = Seed: LVVVGAGDV (KRAS G13D)
YVVNGVGDI

SEQ ID NO: 81880 - protein, 9 aa, synthetic construct
  source 1..9: note = Seed: LVVVGAGDV (KRAS G13D)
YVVNGVGDL

SEQ ID NO: 81881 - protein, 9 aa, synthetic construct
  source 1..9: note = Seed: LVVVGAGDV (KRAS G13D)
YVVNGVGDM

SEQ ID NO: 81882 - protein, 9 aa, synthetic construct
  source 1..9: note = Seed: LVVVGAGDV (KRAS G13D)
YVVNGVGDV

SEQ ID NO: 81883 - protein, 9 aa, synthetic construct
  source 1..9: note = Seed: LVVVGAGDV (KRAS G13D)
YVVQGAGDA

SEQ ID NO: 81884 - protein, 9 aa, synthetic construct
  source 1..9: note = Seed: LVVVGAGDV (KRAS G13D)
YVVQGAGDF

SEQ ID NO: 81885 - protein, 9 aa, synthetic construct
  source 1..9: note = Seed: LVVVGAGDV (KRAS G13D)
YVVQGAGDI

SEQ ID NO: 81886 - protein, 9 aa, synthetic construct
  source 1..9: note = Seed: LVVVGAGDV (KRAS G13D)
YVVQGAGDL

SEQ ID NO: 81887 - protein, 9 aa, synthetic construct
  source 1..9: note = Seed: LVVVGAGDV (KRAS G13D)
YVVQGAGDM

SEQ ID NO: 81888 - protein, 9 aa, synthetic construct
  source 1..9: note = Seed: LVVVGAGDV (KRAS G13D)
YVVQGAGDS

SEQ ID NO: 81889 - protein, 9 aa, synthetic construct
  source 1..9: note = Seed: LVVVGAGDV (KRAS G13D)
YVVQGAGDT

SEQ ID NO: 81890 - protein, 9 aa, synthetic construct
  source 1..9: note = Seed: LVVVGAGDV (KRAS G13D)
YVVQGAGDV

SEQ ID NO: 81891 - protein, 9 aa, synthetic construct
  source 1..9: note = Seed: LVVVGAGDV (KRAS G13D)
YVVQGGGDA

SEQ ID NO: 81892 - protein, 9 aa, synthetic construct
  source 1..9: note = Seed: LVVVGAGDV (KRAS G13D)
YVVQGGGDI

SEQ ID NO: 81893 - protein, 9 aa, synthetic construct
  source 1..9: note = Seed: LVVVGAGDV (KRAS G13D)
YVVQGGGDL

SEQ ID NO: 81894 - protein, 9 aa, synthetic construct
  source 1..9: note = Seed: LVVVGAGDV (KRAS G13D)
YVVQGGGDM

SEQ ID NO: 81895 - protein, 9 aa, synthetic construct
  source 1..9: note = Seed: LVVVGAGDV (KRAS G13D)
YVVQGGGDS

SEQ ID NO: 81896 - protein, 9 aa, synthetic construct
  source 1..9: note = Seed: LVVVGAGDV (KRAS G13D)
YVVQGGGDT

SEQ ID NO: 81897 - protein, 9 aa, synthetic construct
  source 1..9: note = Seed: LVVVGAGDV (KRAS G13D)
YVVQGGGDV

SEQ ID NO: 81898 - protein, 9 aa, synthetic construct
  source 1..9: note = Seed: LVVVGAGDV (KRAS G13D)
YVVQGIGDL

SEQ ID NO: 81899 - protein, 9 aa, synthetic construct
  source 1..9: note = Seed: LVVVGAGDV (KRAS G13D)
YVVQGNGDA

SEQ ID NO: 81900 - protein, 9 aa, synthetic construct
  source 1..9: note = Seed: LVVVGAGDV (KRAS G13D)
YVVQGNGDI

SEQ ID NO: 81901 - protein, 9 aa, synthetic construct
  source 1..9: note = Seed: LVVVGAGDV (KRAS G13D)
YVVQGNGDL

SEQ ID NO: 81902 - protein, 9 aa, synthetic construct
  source 1..9: note = Seed: LVVVGAGDV (KRAS G13D)
YVVQGNGDM

SEQ ID NO: 81903 - protein, 9 aa, synthetic construct
  source 1..9: note = Seed: LVVVGAGDV (KRAS G13D)
YVVQGNGDS

SEQ ID NO: 81904 - protein, 9 aa, synthetic construct
  source 1..9: note = Seed: LVVVGAGDV (KRAS G13D)
YVVQGNGDT

SEQ ID NO: 81905 - protein, 9 aa, synthetic construct
  source 1..9: note = Seed: LVVVGAGDV (KRAS G13D)
YVVQGNGDV

SEQ ID NO: 81906 - protein, 9 aa, synthetic construct
  source 1..9: note = Seed: LVVVGAGDV (KRAS G13D)
YVVQGPGDA

SEQ ID NO: 81907 - protein, 9 aa, synthetic construct
  source 1..9: note = Seed: LVVVGAGDV (KRAS G13D)
YVVQGPGDI

SEQ ID NO: 81908 - protein, 9 aa, synthetic construct
  source 1..9: note = Seed: LVVVGAGDV (KRAS G13D)
YVVQGPGDL

SEQ ID NO: 81909 - protein, 9 aa, synthetic construct
  source 1..9: note = Seed: LVVVGAGDV (KRAS G13D)
YVVQGPGDM

SEQ ID NO: 81910 - protein, 9 aa, synthetic construct
  source 1..9: note = Seed: LVVVGAGDV (KRAS G13D)
YVVQGPGDV

SEQ ID NO: 81911 - protein, 9 aa, synthetic construct
  source 1..9: note = Seed: LVVVGAGDV (KRAS G13D)
YVVQGRGDA

SEQ ID NO: 81912 - protein, 9 aa, synthetic construct
  source 1..9: note = Seed: LVVVGAGDV (KRAS G13D)
YVVQGSGDA

SEQ ID NO: 81913 - protein, 9 aa, synthetic construct
  source 1..9: note = Seed: LVVVGAGDV (KRAS G13D)
YVVQGSGDI

SEQ ID NO: 81914 - protein, 9 aa, synthetic construct
  source 1..9: note = Seed: LVVVGAGDV (KRAS G13D)
YVVQGSGDL

SEQ ID NO: 81915 - protein, 9 aa, synthetic construct
  source 1..9: note = Seed: LVVVGAGDV (KRAS G13D)
YVVQGSGDM

SEQ ID NO: 81916 - protein, 9 aa, synthetic construct
  source 1..9: note = Seed: LVVVGAGDV (KRAS G13D)
YVVQGSGDS

SEQ ID NO: 81917 - protein, 9 aa, synthetic construct
  source 1..9: note = Seed: LVVVGAGDV (KRAS G13D)
YVVQGSGDT

SEQ ID NO: 81918 - protein, 9 aa, synthetic construct
  source 1..9: note = Seed: LVVVGAGDV (KRAS G13D)
YVVQGSGDV

SEQ ID NO: 81919 - protein, 9 aa, synthetic construct
  source 1..9: note = Seed: LVVVGAGDV (KRAS G13D)
YVVQGTGDA

SEQ ID NO: 81920 - protein, 9 aa, synthetic construct
  source 1..9: note = Seed: LVVVGAGDV (KRAS G13D)
YVVQGTGDI

SEQ ID NO: 81921 - protein, 9 aa, synthetic construct
  source 1..9: note = Seed: LVVVGAGDV (KRAS G13D)
YVVQGTGDL

SEQ ID NO: 81922 - protein, 9 aa, synthetic construct
  source 1..9: note = Seed: LVVVGAGDV (KRAS G13D)
YVVQGTGDM

SEQ ID NO: 81923 - protein, 9 aa, synthetic construct
  source 1..9: note = Seed: LVVVGAGDV (KRAS G13D)
YVVQGTGDV

SEQ ID NO: 81924 - protein, 9 aa, synthetic construct
  source 1..9: note = Seed: LVVVGAGDV (KRAS G13D)
YVVQGVGDA

SEQ ID NO: 81925 - protein, 9 aa, synthetic construct
  source 1..9: note = Seed: LVVVGAGDV (KRAS G13D)
YVVQGVGDI

SEQ ID NO: 81926 - protein, 9 aa, synthetic construct
  source 1..9: note = Seed: LVVVGAGDV (KRAS G13D)
YVVQGVGDL

SEQ ID NO: 81927 - protein, 9 aa, synthetic construct
  source 1..9: note = Seed: LVVVGAGDV (KRAS G13D)
YVVQGVGDV

SEQ ID NO: 81928 - protein, 9 aa, synthetic construct
  source 1..9: note = Seed: LVVVGAGDV (KRAS G13D)
YVVSGAGDA

SEQ ID NO: 81929 - protein, 9 aa, synthetic construct
  source 1..9: note = Seed: LVVVGAGDV (KRAS G13D)
YVVSGAGDF

SEQ ID NO: 81930 - protein, 9 aa, synthetic construct
  source 1..9: note = Seed: LVVVGAGDV (KRAS G13D)
YVVSGAGDI

SEQ ID NO: 81931 - protein, 9 aa, synthetic construct
  source 1..9: note = Seed: LVVVGAGDV (KRAS G13D)
YVVSGAGDL

SEQ ID NO: 81932 - protein, 9 aa, synthetic construct
  source 1..9: note = Seed: LVVVGAGDV (KRAS G13D)
YVVSGAGDM

SEQ ID NO: 81933 - protein, 9 aa, synthetic construct
  source 1..9: note = Seed: LVVVGAGDV (KRAS G13D)
YVVSGAGDN

SEQ ID NO: 81934 - protein, 9 aa, synthetic construct
  source 1..9: note = Seed: LVVVGAGDV (KRAS G13D)
YVVSGAGDS

SEQ ID NO: 81935 - protein, 9 aa, synthetic construct
  source 1..9: note = Seed: LVVVGAGDV (KRAS G13D)
YVVSGAGDT

SEQ ID NO: 81936 - protein, 9 aa, synthetic construct
  source 1..9: note = Seed: LVVVGAGDV (KRAS G13D)
YVVSGAGDV

SEQ ID NO: 81937 - protein, 9 aa, synthetic construct
  source 1..9: note = Seed: LVVVGAGDV (KRAS G13D)
YVVSGFGDI

SEQ ID NO: 81938 - protein, 9 aa, synthetic construct
  source 1..9: note = Seed: LVVVGAGDV (KRAS G13D)
YVVSGFGDL

SEQ ID NO: 81939 - protein, 9 aa, synthetic construct
  source 1..9: note = Seed: LVVVGAGDV (KRAS G13D)
YVVSGFGDV

SEQ ID NO: 81940 - protein, 9 aa, synthetic construct
  source 1..9: note = Seed: LVVVGAGDV (KRAS G13D)
YVVSGGGDA

SEQ ID NO: 81941 - protein, 9 aa, synthetic construct
  source 1..9: note = Seed: LVVVGAGDV (KRAS G13D)
YVVSGGGDI

SEQ ID NO: 81942 - protein, 9 aa, synthetic construct
  source 1..9: note = Seed: LVVVGAGDV (KRAS G13D)
YVVSGGGDL

SEQ ID NO: 81943 - protein, 9 aa, synthetic construct
  source 1..9: note = Seed: LVVVGAGDV (KRAS G13D)
YVVSGGGDM

SEQ ID NO: 81944 - protein, 9 aa, synthetic construct
  source 1..9: note = Seed: LVVVGAGDV (KRAS G13D)
YVVSGGGDV

SEQ ID NO: 81945 - protein, 9 aa, synthetic construct
  source 1..9: note = Seed: LVVVGAGDV (KRAS G13D)
YVVSGHGDL

SEQ ID NO: 81946 - protein, 9 aa, synthetic construct
  source 1..9: note = Seed: LVVVGAGDV (KRAS G13D)
YVVSGIGDA

SEQ ID NO: 81947 - protein, 9 aa, synthetic construct
  source 1..9: note = Seed: LVVVGAGDV (KRAS G13D)
YVVSGIGDI

SEQ ID NO: 81948 - protein, 9 aa, synthetic construct
  source 1..9: note = Seed: LVVVGAGDV (KRAS G13D)
YVVSGIGDL

SEQ ID NO: 81949 - protein, 9 aa, synthetic construct
  source 1..9: note = Seed: LVVVGAGDV (KRAS G13D)
YVVSGIGDN

SEQ ID NO: 81950 - protein, 9 aa, synthetic construct
  source 1..9: note = Seed: LVVVGAGDV (KRAS G13D)
YVVSGIGDS

SEQ ID NO: 81951 - protein, 9 aa, synthetic construct
  source 1..9: note = Seed: LVVVGAGDV (KRAS G13D)
YVVSGIGDV

SEQ ID NO: 81952 - protein, 9 aa, synthetic construct
  source 1..9: note = Seed: LVVVGAGDV (KRAS G13D)
YVVSGNGDA

SEQ ID NO: 81953 - protein, 9 aa, synthetic construct
  source 1..9: note = Seed: LVVVGAGDV (KRAS G13D)
YVVSGNGDI

SEQ ID NO: 81954 - protein, 9 aa, synthetic construct
  source 1..9: note = Seed: LVVVGAGDV (KRAS G13D)
YVVSGNGDL

SEQ ID NO: 81955 - protein, 9 aa, synthetic construct
  source 1..9: note = Seed: LVVVGAGDV (KRAS G13D)
YVVSGNGDM

SEQ ID NO: 81956 - protein, 9 aa, synthetic construct
  source 1..9: note = Seed: LVVVGAGDV (KRAS G13D)
YVVSGNGDV

SEQ ID NO: 81957 - protein, 9 aa, synthetic construct
  source 1..9: note = Seed: LVVVGAGDV (KRAS G13D)
YVVSGPGDA

SEQ ID NO: 81958 - protein, 9 aa, synthetic construct
  source 1..9: note = Seed: LVVVGAGDV (KRAS G13D)
YVVSGPGDI

SEQ ID NO: 81959 - protein, 9 aa, synthetic construct
  source 1..9: note = Seed: LVVVGAGDV (KRAS G13D)
YVVSGPGDL

SEQ ID NO: 81960 - protein, 9 aa, synthetic construct
  source 1..9: note = Seed: LVVVGAGDV (KRAS G13D)
YVVSGPGDM

SEQ ID NO: 81961 - protein, 9 aa, synthetic construct
  source 1..9: note = Seed: LVVVGAGDV (KRAS G13D)
YVVSGPGDV

SEQ ID NO: 81962 - protein, 9 aa, synthetic construct
  source 1..9: note = Seed: LVVVGAGDV (KRAS G13D)
YVVSGRGDA

SEQ ID NO: 81963 - protein, 9 aa, synthetic construct
  source 1..9: note = Seed: LVVVGAGDV (KRAS G13D)
YVVSGRGDS

SEQ ID NO: 81964 - protein, 9 aa, synthetic construct
  source 1..9: note = Seed: LVVVGAGDV (KRAS G13D)
YVVSGSGDA

SEQ ID NO: 81965 - protein, 9 aa, synthetic construct
  source 1..9: note = Seed: LVVVGAGDV (KRAS G13D)
YVVSGSGDF

SEQ ID NO: 81966 - protein, 9 aa, synthetic construct
  source 1..9: note = Seed: LVVVGAGDV (KRAS G13D)
YVVSGSGDI

SEQ ID NO: 81967 - protein, 9 aa, synthetic construct
  source 1..9: note = Seed: LVVVGAGDV (KRAS G13D)
YVVSGSGDL

SEQ ID NO: 81968 - protein, 9 aa, synthetic construct
  source 1..9: note = Seed: LVVVGAGDV (KRAS G13D)
YVVSGSGDM

SEQ ID NO: 81969 - protein, 9 aa, synthetic construct
  source 1..9: note = Seed: LVVVGAGDV (KRAS G13D)
YVVSGSGDT

SEQ ID NO: 81970 - protein, 9 aa, synthetic construct
  source 1..9: note = Seed: LVVVGAGDV (KRAS G13D)
YVVSGSGDV

SEQ ID NO: 81971 - protein, 9 aa, synthetic construct
  source 1..9: note = Seed: LVVVGAGDV (KRAS G13D)
YVVSGTGDA

SEQ ID NO: 81972 - protein, 9 aa, synthetic construct
  source 1..9: note = Seed: LVVVGAGDV (KRAS G13D)
YVVSGTGDI

SEQ ID NO: 81973 - protein, 9 aa, synthetic construct
  source 1..9: note = Seed: LVVVGAGDV (KRAS G13D)
YVVSGTGDL

SEQ ID NO: 81974 - protein, 9 aa, synthetic construct
  source 1..9: note = Seed: LVVVGAGDV (KRAS G13D)
YVVSGTGDM

SEQ ID NO: 81975 - protein, 9 aa, synthetic construct
  source 1..9: note = Seed: LVVVGAGDV (KRAS G13D)
YVVSGTGDV

SEQ ID NO: 81976 - protein, 9 aa, synthetic construct
  source 1..9: note = Seed: LVVVGAGDV (KRAS G13D)
YVVSGVGDA

SEQ ID NO: 81977 - protein, 9 aa, synthetic construct
  source 1..9: note = Seed: LVVVGAGDV (KRAS G13D)
YVVSGVGDI

SEQ ID NO: 81978 - protein, 9 aa, synthetic construct
  source 1..9: note = Seed: LVVVGAGDV (KRAS G13D)
YVVSGVGDL

SEQ ID NO: 81979 - protein, 9 aa, synthetic construct
  source 1..9: note = Seed: LVVVGAGDV (KRAS G13D)
YVVSGVGDM

SEQ ID NO: 81980 - protein, 9 aa, synthetic construct
  source 1..9: note = Seed: LVVVGAGDV (KRAS G13D)
YVVSGVGDN

SEQ ID NO: 81981 - protein, 9 aa, synthetic construct
  source 1..9: note = Seed: LVVVGAGDV (KRAS G13D)
YVVSGVGDS

SEQ ID NO: 81982 - protein, 9 aa, synthetic construct
  source 1..9: note = Seed: LVVVGAGDV (KRAS G13D)
YVVSGVGDV

SEQ ID NO: 81983 - protein, 9 aa, synthetic construct
  source 1..9: note = Seed: LVVVGAGDV (KRAS G13D)
YVVTGAGDA

SEQ ID NO: 81984 - protein, 9 aa, synthetic construct
  source 1..9: note = Seed: LVVVGAGDV (KRAS G13D)
YVVTGAGDI

SEQ ID NO: 81985 - protein, 9 aa, synthetic construct
  source 1..9: note = Seed: LVVVGAGDV (KRAS G13D)
YVVTGAGDL

SEQ ID NO: 81986 - protein, 9 aa, synthetic construct
  source 1..9: note = Seed: LVVVGAGDV (KRAS G13D)
YVVTGAGDM

SEQ ID NO: 81987 - protein, 9 aa, synthetic construct
  source 1..9: note = Seed: LVVVGAGDV (KRAS G13D)
YVVTGAGDV

SEQ ID NO: 81988 - protein, 9 aa, synthetic construct
  source 1..9: note = Seed: LVVVGAGDV (KRAS G13D)
YVVTGFGDI

SEQ ID NO: 81989 - protein, 9 aa, synthetic construct
  source 1..9: note = Seed: LVVVGAGDV (KRAS G13D)
YVVTGFGDL

SEQ ID NO: 81990 - protein, 9 aa, synthetic construct
  source 1..9: note = Seed: LVVVGAGDV (KRAS G13D)
YVVTGFGDM

SEQ ID NO: 81991 - protein, 9 aa, synthetic construct
  source 1..9: note = Seed: LVVVGAGDV (KRAS G13D)
YVVTGFGDV

SEQ ID NO: 81992 - protein, 9 aa, synthetic construct
  source 1..9: note = Seed: LVVVGAGDV (KRAS G13D)
YVVTGGGDA

SEQ ID NO: 81993 - protein, 9 aa, synthetic construct
  source 1..9: note = Seed: LVVVGAGDV (KRAS G13D)
YVVTGGGDI

SEQ ID NO: 81994 - protein, 9 aa, synthetic construct
  source 1..9: note = Seed: LVVVGAGDV (KRAS G13D)
YVVTGGGDL

SEQ ID NO: 81995 - protein, 9 aa, synthetic construct
  source 1..9: note = Seed: LVVVGAGDV (KRAS G13D)
YVVTGGGDM

SEQ ID NO: 81996 - protein, 9 aa, synthetic construct
  source 1..9: note = Seed: LVVVGAGDV (KRAS G13D)
YVVTGGGDV

SEQ ID NO: 81997 - protein, 9 aa, synthetic construct
  source 1..9: note = Seed: LVVVGAGDV (KRAS G13D)
YVVTGIGDA

SEQ ID NO: 81998 - protein, 9 aa, synthetic construct
  source 1..9: note = Seed: LVVVGAGDV (KRAS G13D)
YVVTGIGDN

SEQ ID NO: 81999 - protein, 9 aa, synthetic construct
  source 1..9: note = Seed: LVVVGAGDV (KRAS G13D)
YVVTGIGDS

SEQ ID NO: 82000 - protein, 9 aa, synthetic construct
  source 1..9: note = Seed: LVVVGAGDV (KRAS G13D)
YVVTGNGDI

SEQ ID NO: 82001 - protein, 9 aa, synthetic construct
  source 1..9: note = Seed: LVVVGAGDV (KRAS G13D)
YVVTGNGDL

SEQ ID NO: 82002 - protein, 9 aa, synthetic construct
  source 1..9: note = Seed: LVVVGAGDV (KRAS G13D)
YVVTGNGDV

SEQ ID NO: 82003 - protein, 9 aa, synthetic construct
  source 1..9: note = Seed: LVVVGAGDV (KRAS G13D)
YVVTGPGDI

SEQ ID NO: 82004 - protein, 9 aa, synthetic construct
  source 1..9: note = Seed: LVVVGAGDV (KRAS G13D)
YVVTGPGDL

SEQ ID NO: 82005 - protein, 9 aa, synthetic construct
  source 1..9: note = Seed: LVVVGAGDV (KRAS G13D)
YVVTGPGDV

SEQ ID NO: 82006 - protein, 9 aa, synthetic construct
  source 1..9: note = Seed: LVVVGAGDV (KRAS G13D)
YVVTGRGDA

SEQ ID NO: 82007 - protein, 9 aa, synthetic construct
  source 1..9: note = Seed: LVVVGAGDV (KRAS G13D)
YVVTGRGDS

SEQ ID NO: 82008 - protein, 9 aa, synthetic construct
  source 1..9: note = Seed: LVVVGAGDV (KRAS G13D)
YVVTGSGDA

SEQ ID NO: 82009 - protein, 9 aa, synthetic construct
  source 1..9: note = Seed: LVVVGAGDV (KRAS G13D)
YVVTGSGDF

SEQ ID NO: 82010 - protein, 9 aa, synthetic construct
  source 1..9: note = Seed: LVVVGAGDV (KRAS G13D)
YVVTGSGDI

SEQ ID NO: 82011 - protein, 9 aa, synthetic construct
  source 1..9: note = Seed: LVVVGAGDV (KRAS G13D)
YVVTGSGDL

SEQ ID NO: 82012 - protein, 9 aa, synthetic construct
  source 1..9: note = Seed: LVVVGAGDV (KRAS G13D)
YVVTGSGDM

SEQ ID NO: 82013 - protein, 9 aa, synthetic construct
  source 1..9: note = Seed: LVVVGAGDV (KRAS G13D)
YVVTGSGDV

SEQ ID NO: 82014 - protein, 9 aa, synthetic construct
  source 1..9: note = Seed: LVVVGAGDV (KRAS G13D)
YVVTGTGDI

SEQ ID NO: 82015 - protein, 9 aa, synthetic construct
  source 1..9: note = Seed: LVVVGAGDV (KRAS G13D)
YVVTGTGDL

SEQ ID NO: 82016 - protein, 9 aa, synthetic construct
  source 1..9: note = Seed: LVVVGAGDV (KRAS G13D)
YVVTGVGDA

SEQ ID NO: 82017 - protein, 9 aa, synthetic construct
  source 1..9: note = Seed: LVVVGAGDV (KRAS G13D)
YVVTGVGDI

SEQ ID NO: 82018 - protein, 9 aa, synthetic construct
  source 1..9: note = Seed: LVVVGAGDV (KRAS G13D)
YVVTGVGDL

SEQ ID NO: 82019 - protein, 9 aa, synthetic construct
  source 1..9: note = Seed: LVVVGAGDV (KRAS G13D)
YVVTGVGDM

SEQ ID NO: 82020 - protein, 9 aa, synthetic construct
  source 1..9: note = Seed: LVVVGAGDV (KRAS G13D)
YVVTGVGDV

SEQ ID NO: 82021 - protein, 9 aa, synthetic construct
  source 1..9: note = Seed: LVVVGAGDV (KRAS G13D)
YVVVGAGDA

SEQ ID NO: 82022 - protein, 9 aa, synthetic construct
  source 1..9: note = Seed: LVVVGAGDV (KRAS G13D)
YVVVGAGDF

SEQ ID NO: 82023 - protein, 9 aa, synthetic construct
  source 1..9: note = Seed: LVVVGAGDV (KRAS G13D)
YVVVGAGDG

SEQ ID NO: 82024 - protein, 9 aa, synthetic construct
  source 1..9: note = Seed: LVVVGAGDV (KRAS G13D)
YVVVGAGDH

SEQ ID NO: 82025 - protein, 9 aa, synthetic construct
  source 1..9: note = Seed: LVVVGAGDV (KRAS G13D)
YVVVGAGDI

SEQ ID NO: 82026 - protein, 9 aa, synthetic construct
  source 1..9: note = Seed: LVVVGAGDV (KRAS G13D)
YVVVGAGDL

SEQ ID NO: 82027 - protein, 9 aa, synthetic construct
  source 1..9: note = Seed: LVVVGAGDV (KRAS G13D)
YVVVGAGDM

SEQ ID NO: 82028 - protein, 9 aa, synthetic construct
  source 1..9: note = Seed: LVVVGAGDV (KRAS G13D)
YVVVGAGDN

SEQ ID NO: 82029 - protein, 9 aa, synthetic construct
  source 1..9: note = Seed: LVVVGAGDV (KRAS G13D)
YVVVGAGDQ

SEQ ID NO: 82030 - protein, 9 aa, synthetic construct
  source 1..9: note = Seed: LVVVGAGDV (KRAS G13D)
YVVVGAGDS

SEQ ID NO: 82031 - protein, 9 aa, synthetic construct
  source 1..9: note = Seed: LVVVGAGDV (KRAS G13D)
YVVVGAGDT

SEQ ID NO: 82032 - protein, 9 aa, synthetic construct
  source 1..9: note = Seed: LVVVGAGDV (KRAS G13D)
YVVVGAGDV

SEQ ID NO: 82033 - protein, 9 aa, synthetic construct
  source 1..9: note = Seed: LVVVGAGDV (KRAS G13D)
YVVVGFGDI

SEQ ID NO: 82034 - protein, 9 aa, synthetic construct
  source 1..9: note = Seed: LVVVGAGDV (KRAS G13D)
YVVVGFGDL

SEQ ID NO: 82035 - protein, 9 aa, synthetic construct
  source 1..9: note = Seed: LVVVGAGDV (KRAS G13D)
YVVVGFGDV

SEQ ID NO: 82036 - protein, 9 aa, synthetic construct
  source 1..9: note = Seed: LVVVGAGDV (KRAS G13D)
YVVVGGGDA

SEQ ID NO: 82037 - protein, 9 aa, synthetic construct
  source 1..9: note = Seed: LVVVGAGDV (KRAS G13D)
YVVVGGGDI

SEQ ID NO: 82038 - protein, 9 aa, synthetic construct
  source 1..9: note = Seed: LVVVGAGDV (KRAS G13D)
YVVVGGGDL

SEQ ID NO: 82039 - protein, 9 aa, synthetic construct
  source 1..9: note = Seed: LVVVGAGDV (KRAS G13D)
YVVVGGGDM

SEQ ID NO: 82040 - protein, 9 aa, synthetic construct
  source 1..9: note = Seed: LVVVGAGDV (KRAS G13D)
YVVVGGGDS

SEQ ID NO: 82041 - protein, 9 aa, synthetic construct
  source 1..9: note = Seed: LVVVGAGDV (KRAS G13D)
YVVVGGGDT

SEQ ID NO: 82042 - protein, 9 aa, synthetic construct
  source 1..9: note = Seed: LVVVGAGDV (KRAS G13D)
YVVVGGGDV

SEQ ID NO: 82043 - protein, 9 aa, synthetic construct
  source 1..9: note = Seed: LVVVGAGDV (KRAS G13D)
YVVVGHGDL

SEQ ID NO: 82044 - protein, 9 aa, synthetic construct
  source 1..9: note = Seed: LVVVGAGDV (KRAS G13D)
YVVVGIGDA

SEQ ID NO: 82045 - protein, 9 aa, synthetic construct
  source 1..9: note = Seed: LVVVGAGDV (KRAS G13D)
YVVVGIGDI

SEQ ID NO: 82046 - protein, 9 aa, synthetic construct
  source 1..9: note = Seed: LVVVGAGDV (KRAS G13D)
YVVVGIGDL

SEQ ID NO: 82047 - protein, 9 aa, synthetic construct
  source 1..9: note = Seed: LVVVGAGDV (KRAS G13D)
YVVVGIGDM

SEQ ID NO: 82048 - protein, 9 aa, synthetic construct
  source 1..9: note = Seed: LVVVGAGDV (KRAS G13D)
YVVVGIGDN

SEQ ID NO: 82049 - protein, 9 aa, synthetic construct
  source 1..9: note = Seed: LVVVGAGDV (KRAS G13D)
YVVVGIGDQ

SEQ ID NO: 82050 - protein, 9 aa, synthetic construct
  source 1..9: note = Seed: LVVVGAGDV (KRAS G13D)
YVVVGIGDS

SEQ ID NO: 82051 - protein, 9 aa, synthetic construct
  source 1..9: note = Seed: LVVVGAGDV (KRAS G13D)
YVVVGIGDT

SEQ ID NO: 82052 - protein, 9 aa, synthetic construct
  source 1..9: note = Seed: LVVVGAGDV (KRAS G13D)
YVVVGIGDV

SEQ ID NO: 82053 - protein, 9 aa, synthetic construct
  source 1..9: note = Seed: LVVVGAGDV (KRAS G13D)
YVVVGKGDA

SEQ ID NO: 82054 - protein, 9 aa, synthetic construct
  source 1..9: note = Seed: LVVVGAGDV (KRAS G13D)
YVVVGKGDS

SEQ ID NO: 82055 - protein, 9 aa, synthetic construct
  source 1..9: note = Seed: LVVVGAGDV (KRAS G13D)
YVVVGKGDT

SEQ ID NO: 82056 - protein, 9 aa, synthetic construct
  source 1..9: note = Seed: LVVVGAGDV (KRAS G13D)
YVVVGMGDA

SEQ ID NO: 82057 - protein, 9 aa, synthetic construct
  source 1..9: note = Seed: LVVVGAGDV (KRAS G13D)
YVVVGMGDL

SEQ ID NO: 82058 - protein, 9 aa, synthetic construct
  source 1..9: note = Seed: LVVVGAGDV (KRAS G13D)
YVVVGMGDM

SEQ ID NO: 82059 - protein, 9 aa, synthetic construct
  source 1..9: note = Seed: LVVVGAGDV (KRAS G13D)
YVVVGMGDN

SEQ ID NO: 82060 - protein, 9 aa, synthetic construct
  source 1..9: note = Seed: LVVVGAGDV (KRAS G13D)
YVVVGNGDA

SEQ ID NO: 82061 - protein, 9 aa, synthetic construct
  source 1..9: note = Seed: LVVVGAGDV (KRAS G13D)
YVVVGNGDI

SEQ ID NO: 82062 - protein, 9 aa, synthetic construct
  source 1..9: note = Seed: LVVVGAGDV (KRAS G13D)
YVVVGNGDL

SEQ ID NO: 82063 - protein, 9 aa, synthetic construct
  source 1..9: note = Seed: LVVVGAGDV (KRAS G13D)
YVVVGNGDM

SEQ ID NO: 82064 - protein, 9 aa, synthetic construct
  source 1..9: note = Seed: LVVVGAGDV (KRAS G13D)
YVVVGNGDN

SEQ ID NO: 82065 - protein, 9 aa, synthetic construct
  source 1..9: note = Seed: LVVVGAGDV (KRAS G13D)
YVVVGNGDS

SEQ ID NO: 82066 - protein, 9 aa, synthetic construct
  source 1..9: note = Seed: LVVVGAGDV (KRAS G13D)
YVVVGNGDT

SEQ ID NO: 82067 - protein, 9 aa, synthetic construct
  source 1..9: note = Seed: LVVVGAGDV (KRAS G13D)
YVVVGNGDV

SEQ ID NO: 82068 - protein, 9 aa, synthetic construct
  source 1..9: note = Seed: LVVVGAGDV (KRAS G13D)
YVVVGPGDA

SEQ ID NO: 82069 - protein, 9 aa, synthetic construct
  source 1..9: note = Seed: LVVVGAGDV (KRAS G13D)
YVVVGPGDH

SEQ ID NO: 82070 - protein, 9 aa, synthetic construct
  source 1..9: note = Seed: LVVVGAGDV (KRAS G13D)
YVVVGPGDI

SEQ ID NO: 82071 - protein, 9 aa, synthetic construct
  source 1..9: note = Seed: LVVVGAGDV (KRAS G13D)
YVVVGPGDL

SEQ ID NO: 82072 - protein, 9 aa, synthetic construct
  source 1..9: note = Seed: LVVVGAGDV (KRAS G13D)
YVVVGPGDM

SEQ ID NO: 82073 - protein, 9 aa, synthetic construct
  source 1..9: note = Seed: LVVVGAGDV (KRAS G13D)
YVVVGPGDN

SEQ ID NO: 82074 - protein, 9 aa, synthetic construct
  source 1..9: note = Seed: LVVVGAGDV (KRAS G13D)
YVVVGPGDS

SEQ ID NO: 82075 - protein, 9 aa, synthetic construct
  source 1..9: note = Seed: LVVVGAGDV (KRAS G13D)
YVVVGPGDT

SEQ ID NO: 82076 - protein, 9 aa, synthetic construct
  source 1..9: note = Seed: LVVVGAGDV (KRAS G13D)
YVVVGPGDV

SEQ ID NO: 82077 - protein, 9 aa, synthetic construct
  source 1..9: note = Seed: LVVVGAGDV (KRAS G13D)
YVVVGRGDA

SEQ ID NO: 82078 - protein, 9 aa, synthetic construct
  source 1..9: note = Seed: LVVVGAGDV (KRAS G13D)
YVVVGRGDG

SEQ ID NO: 82079 - protein, 9 aa, synthetic construct
  source 1..9: note = Seed: LVVVGAGDV (KRAS G13D)
YVVVGRGDH

SEQ ID NO: 82080 - protein, 9 aa, synthetic construct
  source 1..9: note = Seed: LVVVGAGDV (KRAS G13D)
YVVVGRGDI

SEQ ID NO: 82081 - protein, 9 aa, synthetic construct
  source 1..9: note = Seed: LVVVGAGDV (KRAS G13D)
YVVVGRGDL

SEQ ID NO: 82082 - protein, 9 aa, synthetic construct
  source 1..9: note = Seed: LVVVGAGDV (KRAS G13D)
YVVVGRGDM

SEQ ID NO: 82083 - protein, 9 aa, synthetic construct
  source 1..9: note = Seed: LVVVGAGDV (KRAS G13D)
YVVVGRGDN

SEQ ID NO: 82084 - protein, 9 aa, synthetic construct
  source 1..9: note = Seed: LVVVGAGDV (KRAS G13D)
YVVVGRGDQ

SEQ ID NO: 82085 - protein, 9 aa, synthetic construct
  source 1..9: note = Seed: LVVVGAGDV (KRAS G13D)
YVVVGRGDS

SEQ ID NO: 82086 - protein, 9 aa, synthetic construct
  source 1..9: note = Seed: LVVVGAGDV (KRAS G13D)
YVVVGRGDT

SEQ ID NO: 82087 - protein, 9 aa, synthetic construct
  source 1..9: note = Seed: LVVVGAGDV (KRAS G13D)
YVVVGRGDV

SEQ ID NO: 82088 - protein, 9 aa, synthetic construct
  source 1..9: note = Seed: LVVVGAGDV (KRAS G13D)
YVVVGSGDA

SEQ ID NO: 82089 - protein, 9 aa, synthetic construct
  source 1..9: note = Seed: LVVVGAGDV (KRAS G13D)
YVVVGSGDI

SEQ ID NO: 82090 - protein, 9 aa, synthetic construct
  source 1..9: note = Seed: LVVVGAGDV (KRAS G13D)
YVVVGSGDL

SEQ ID NO: 82091 - protein, 9 aa, synthetic construct
  source 1..9: note = Seed: LVVVGAGDV (KRAS G13D)
YVVVGSGDM

SEQ ID NO: 82092 - protein, 9 aa, synthetic construct
  source 1..9: note = Seed: LVVVGAGDV (KRAS G13D)
YVVVGSGDN

SEQ ID NO: 82093 - protein, 9 aa, synthetic construct
  source 1..9: note = Seed: LVVVGAGDV (KRAS G13D)
YVVVGSGDS

SEQ ID NO: 82094 - protein, 9 aa, synthetic construct
  source 1..9: note = Seed: LVVVGAGDV (KRAS G13D)
YVVVGSGDT

SEQ ID NO: 82095 - protein, 9 aa, synthetic construct
  source 1..9: note = Seed: LVVVGAGDV (KRAS G13D)
YVVVGSGDV

SEQ ID NO: 82096 - protein, 9 aa, synthetic construct
  source 1..9: note = Seed: LVVVGAGDV (KRAS G13D)
YVVVGTGDA

SEQ ID NO: 82097 - protein, 9 aa, synthetic construct
  source 1..9: note = Seed: LVVVGAGDV (KRAS G13D)
YVVVGTGDI

SEQ ID NO: 82098 - protein, 9 aa, synthetic construct
  source 1..9: note = Seed: LVVVGAGDV (KRAS G13D)
YVVVGTGDL

SEQ ID NO: 82099 - protein, 9 aa, synthetic construct
  source 1..9: note = Seed: LVVVGAGDV (KRAS G13D)
YVVVGTGDM

SEQ ID NO: 82100 - protein, 9 aa, synthetic construct
  source 1..9: note = Seed: LVVVGAGDV (KRAS G13D)
YVVVGTGDN

SEQ ID NO: 82101 - protein, 9 aa, synthetic construct
  source 1..9: note = Seed: LVVVGAGDV (KRAS G13D)
YVVVGTGDS

SEQ ID NO: 82102 - protein, 9 aa, synthetic construct
  source 1..9: note = Seed: LVVVGAGDV (KRAS G13D)
YVVVGTGDT

SEQ ID NO: 82103 - protein, 9 aa, synthetic construct
  source 1..9: note = Seed: LVVVGAGDV (KRAS G13D)
YVVVGTGDV

SEQ ID NO: 82104 - protein, 9 aa, synthetic construct
  source 1..9: note = Seed: LVVVGAGDV (KRAS G13D)
YVVVGVGDA

SEQ ID NO: 82105 - protein, 9 aa, synthetic construct
  source 1..9: note = Seed: LVVVGAGDV (KRAS G13D)
YVVVGVGDH

SEQ ID NO: 82106 - protein, 9 aa, synthetic construct
  source 1..9: note = Seed: LVVVGAGDV (KRAS G13D)
YVVVGVGDI

SEQ ID NO: 82107 - protein, 9 aa, synthetic construct
  source 1..9: note = Seed: LVVVGAGDV (KRAS G13D)
YVVVGVGDL

SEQ ID NO: 82108 - protein, 9 aa, synthetic construct
  source 1..9: note = Seed: LVVVGAGDV (KRAS G13D)
YVVVGVGDM

SEQ ID NO: 82109 - protein, 9 aa, synthetic construct
  source 1..9: note = Seed: LVVVGAGDV (KRAS G13D)
YVVVGVGDN

SEQ ID NO: 82110 - protein, 9 aa, synthetic construct
  source 1..9: note = Seed: LVVVGAGDV (KRAS G13D)
YVVVGVGDS

SEQ ID NO: 82111 - protein, 9 aa, synthetic construct
  source 1..9: note = Seed: LVVVGAGDV (KRAS G13D)
YVVVGVGDT

SEQ ID NO: 82112 - protein, 9 aa, synthetic construct
  source 1..9: note = Seed: LVVVGAGDV (KRAS G13D)
YVVVGVGDV

SEQ ID NO: 82113 - protein, 9 aa, synthetic construct
  source 1..9: note = Seed: LVVVGAGDV (KRAS G13D)
YVVWGAGDL

SEQ ID NO: 82114 - protein, 9 aa, synthetic construct
  source 1..9: note = Seed: LVVVGAGDV (KRAS G13D)
YVVYGSGDL

SEQ ID NO: 82115 - protein, 9 aa, synthetic construct
  source 1..9: note = Seed: VGAGDVGKS (KRAS G13D)
AGAADAGKA

SEQ ID NO: 82116 - protein, 9 aa, synthetic construct
  source 1..9: note = Seed: VGAGDVGKS (KRAS G13D)
AGAADAGKC

SEQ ID NO: 82117 - protein, 9 aa, synthetic construct
  source 1..9: note = Seed: VGAGDVGKS (KRAS G13D)
AGAADAGKG

SEQ ID NO: 82118 - protein, 9 aa, synthetic construct
  source 1..9: note = Seed: VGAGDVGKS (KRAS G13D)
AGAADAGKI

SEQ ID NO: 82119 - protein, 9 aa, synthetic construct
  source 1..9: note = Seed: VGAGDVGKS (KRAS G13D)
AGAADAGKN

SEQ ID NO: 82120 - protein, 9 aa, synthetic construct
  source 1..9: note = Seed: VGAGDVGKS (KRAS G13D)
AGAADAGKS

SEQ ID NO: 82121 - protein, 9 aa, synthetic construct
  source 1..9: note = Seed: VGAGDVGKS (KRAS G13D)
AGAADAGKT

SEQ ID NO: 82122 - protein, 9 aa, synthetic construct
  source 1..9: note = Seed: VGAGDVGKS (KRAS G13D)
AGAADAGKV

SEQ ID NO: 82123 - protein, 9 aa, synthetic construct
  source 1..9: note = Seed: VGAGDVGKS (KRAS G13D)
AGAADCGKA

SEQ ID NO: 82124 - protein, 9 aa, synthetic construct
  source 1..9: note = Seed: VGAGDVGKS (KRAS G13D)
AGAADIGKA

SEQ ID NO: 82125 - protein, 9 aa, synthetic construct
  source 1..9: note = Seed: VGAGDVGKS (KRAS G13D)
AGAADPGKA

SEQ ID NO: 82126 - protein, 9 aa, synthetic construct
  source 1..9: note = Seed: VGAGDVGKS (KRAS G13D)
AGAADPGKS

SEQ ID NO: 82127 - protein, 9 aa, synthetic construct
  source 1..9: note = Seed: VGAGDVGKS (KRAS G13D)
AGAADVGKA

SEQ ID NO: 82128 - protein, 9 aa, synthetic construct
  source 1..9: note = Seed: VGAGDVGKS (KRAS G13D)
AGAADVGKI

SEQ ID NO: 82129 - protein, 9 aa, synthetic construct
  source 1..9: note = Seed: VGAGDVGKS (KRAS G13D)
AGAADVGKN

SEQ ID NO: 82130 - protein, 9 aa, synthetic construct
  source 1..9: note = Seed: VGAGDVGKS (KRAS G13D)
AGAADVGKS

SEQ ID NO: 82131 - protein, 9 aa, synthetic construct
  source 1..9: note = Seed: VGAGDVGKS (KRAS G13D)
AGAADVGKT

SEQ ID NO: 82132 - protein, 9 aa, synthetic construct
  source 1..9: note = Seed: VGAGDVGKS (KRAS G13D)
AGAADVGKV

SEQ ID NO: 82133 - protein, 9 aa, synthetic construct
  source 1..9: note = Seed: VGAGDVGKS (KRAS G13D)
AGAGDAGKA

SEQ ID NO: 82134 - protein, 9 aa, synthetic construct
  source 1..9: note = Seed: VGAGDVGKS (KRAS G13D)
AGAGDAGKI

SEQ ID NO: 82135 - protein, 9 aa, synthetic construct
  source 1..9: note = Seed: VGAGDVGKS (KRAS G13D)
AGAGDAGKS

SEQ ID NO: 82136 - protein, 9 aa, synthetic construct
  source 1..9: note = Seed: VGAGDVGKS (KRAS G13D)
AGAGDAGKT

SEQ ID NO: 82137 - protein, 9 aa, synthetic construct
  source 1..9: note = Seed: VGAGDVGKS (KRAS G13D)
AGAGDAGKV

SEQ ID NO: 82138 - protein, 9 aa, synthetic construct
  source 1..9: note = Seed: VGAGDVGKS (KRAS G13D)
AGAGDPGKA

SEQ ID NO: 82139 - protein, 9 aa, synthetic construct
  source 1..9: note = Seed: VGAGDVGKS (KRAS G13D)
AGAGDVGKA

SEQ ID NO: 82140 - protein, 9 aa, synthetic construct
  source 1..9: note = Seed: VGAGDVGKS (KRAS G13D)
AGAGDVGKI

SEQ ID NO: 82141 - protein, 9 aa, synthetic construct
  source 1..9: note = Seed: VGAGDVGKS (KRAS G13D)
AGAGDVGKS

SEQ ID NO: 82142 - protein, 9 aa, synthetic construct
  source 1..9: note = Seed: VGAGDVGKS (KRAS G13D)
AGAGDVGKV

SEQ ID NO: 82143 - protein, 9 aa, synthetic construct
  source 1..9: note = Seed: VGAGDVGKS (KRAS G13D)
AGASDAGKA

SEQ ID NO: 82144 - protein, 9 aa, synthetic construct
  source 1..9: note = Seed: VGAGDVGKS (KRAS G13D)
AGASDAGKI

SEQ ID NO: 82145 - protein, 9 aa, synthetic construct
  source 1..9: note = Seed: VGAGDVGKS (KRAS G13D)
AGASDAGKS

SEQ ID NO: 82146 - protein, 9 aa, synthetic construct
  source 1..9: note = Seed: VGAGDVGKS (KRAS G13D)
AGASDAGKT

SEQ ID NO: 82147 - protein, 9 aa, synthetic construct
  source 1..9: note = Seed: VGAGDVGKS (KRAS G13D)
AGASDAGKV

SEQ ID NO: 82148 - protein, 9 aa, synthetic construct
  source 1..9: note = Seed: VGAGDVGKS (KRAS G13D)
AGASDVGKA

SEQ ID NO: 82149 - protein, 9 aa, synthetic construct
  source 1..9: note = Seed: VGAGDVGKS (KRAS G13D)
CGALDAGKV

SEQ ID NO: 82150 - protein, 9 aa, synthetic construct
  source 1..9: note = Seed: VGAGDVGKS (KRAS G13D)
EGAADAGKS

SEQ ID NO: 82151 - protein, 9 aa, synthetic construct
  source 1..9: note = Seed: VGAGDVGKS (KRAS G13D)
EGAADAGKT

SEQ ID NO: 82152 - protein, 9 aa, synthetic construct
  source 1..9: note = Seed: VGAGDVGKS (KRAS G13D)
EGAADVGKA

SEQ ID NO: 82153 - protein, 9 aa, synthetic construct
  source 1..9: note = Seed: VGAGDVGKS (KRAS G13D)
FGAADAGKA

SEQ ID NO: 82154 - protein, 9 aa, synthetic construct
  source 1..9: note = Seed: VGAGDVGKS (KRAS G13D)
FGAADAGKC

SEQ ID NO: 82155 - protein, 9 aa, synthetic construct
  source 1..9: note = Seed: VGAGDVGKS (KRAS G13D)
FGAADAGKF

SEQ ID NO: 82156 - protein, 9 aa, synthetic construct
  source 1..9: note = Seed: VGAGDVGKS (KRAS G13D)
FGAADAGKG

SEQ ID NO: 82157 - protein, 9 aa, synthetic construct
  source 1..9: note = Seed: VGAGDVGKS (KRAS G13D)
FGAADAGKI

SEQ ID NO: 82158 - protein, 9 aa, synthetic construct
  source 1..9: note = Seed: VGAGDVGKS (KRAS G13D)
FGAADAGKL

SEQ ID NO: 82159 - protein, 9 aa, synthetic construct
  source 1..9: note = Seed: VGAGDVGKS (KRAS G13D)
FGAADAGKM

SEQ ID NO: 82160 - protein, 9 aa, synthetic construct
  source 1..9: note = Seed: VGAGDVGKS (KRAS G13D)
FGAADAGKN

SEQ ID NO: 82161 - protein, 9 aa, synthetic construct
  source 1..9: note = Seed: VGAGDVGKS (KRAS G13D)
FGAADAGKS

SEQ ID NO: 82162 - protein, 9 aa, synthetic construct
  source 1..9: note = Seed: VGAGDVGKS (KRAS G13D)
FGAADAGKT

SEQ ID NO: 82163 - protein, 9 aa, synthetic construct
  source 1..9: note = Seed: VGAGDVGKS (KRAS G13D)
FGAADAGKV

SEQ ID NO: 82164 - protein, 9 aa, synthetic construct
  source 1..9: note = Seed: VGAGDVGKS (KRAS G13D)
FGAADAGKY

SEQ ID NO: 82165 - protein, 9 aa, synthetic construct
  source 1..9: note = Seed: VGAGDVGKS (KRAS G13D)
FGAADGGKA

SEQ ID NO: 82166 - protein, 9 aa, synthetic construct
  source 1..9: note = Seed: VGAGDVGKS (KRAS G13D)
FGAADGGKI

SEQ ID NO: 82167 - protein, 9 aa, synthetic construct
  source 1..9: note = Seed: VGAGDVGKS (KRAS G13D)
FGAADGGKL

SEQ ID NO: 82168 - protein, 9 aa, synthetic construct
  source 1..9: note = Seed: VGAGDVGKS (KRAS G13D)
FGAADGGKM

SEQ ID NO: 82169 - protein, 9 aa, synthetic construct
  source 1..9: note = Seed: VGAGDVGKS (KRAS G13D)
FGAADGGKS

SEQ ID NO: 82170 - protein, 9 aa, synthetic construct
  source 1..9: note = Seed: VGAGDVGKS (KRAS G13D)
FGAADGGKT

SEQ ID NO: 82171 - protein, 9 aa, synthetic construct
  source 1..9: note = Seed: VGAGDVGKS (KRAS G13D)
FGAADGGKV

SEQ ID NO: 82172 - protein, 9 aa, synthetic construct
  source 1..9: note = Seed: VGAGDVGKS (KRAS G13D)
FGAADIGKA

SEQ ID NO: 82173 - protein, 9 aa, synthetic construct
  source 1..9: note = Seed: VGAGDVGKS (KRAS G13D)
FGAADIGKI

SEQ ID NO: 82174 - protein, 9 aa, synthetic construct
  source 1..9: note = Seed: VGAGDVGKS (KRAS G13D)
FGAADIGKS

SEQ ID NO: 82175 - protein, 9 aa, synthetic construct
  source 1..9: note = Seed: VGAGDVGKS (KRAS G13D)
FGAADIGKT

SEQ ID NO: 82176 - protein, 9 aa, synthetic construct
  source 1..9: note = Seed: VGAGDVGKS (KRAS G13D)
FGAADIGKV

SEQ ID NO: 82177 - protein, 9 aa, synthetic construct
  source 1..9: note = Seed: VGAGDVGKS (KRAS G13D)
FGAADLGKA

SEQ ID NO: 82178 - protein, 9 aa, synthetic construct
  source 1..9: note = Seed: VGAGDVGKS (KRAS G13D)
FGAADMGKA

SEQ ID NO: 82179 - protein, 9 aa, synthetic construct
  source 1..9: note = Seed: VGAGDVGKS (KRAS G13D)
FGAADNGKA

SEQ ID NO: 82180 - protein, 9 aa, synthetic construct
  source 1..9: note = Seed: VGAGDVGKS (KRAS G13D)
FGAADNGKI

SEQ ID NO: 82181 - protein, 9 aa, synthetic construct
  source 1..9: note = Seed: VGAGDVGKS (KRAS G13D)
FGAADNGKL

SEQ ID NO: 82182 - protein, 9 aa, synthetic construct
  source 1..9: note = Seed: VGAGDVGKS (KRAS G13D)
FGAADNGKM

SEQ ID NO: 82183 - protein, 9 aa, synthetic construct
  source 1..9: note = Seed: VGAGDVGKS (KRAS G13D)
FGAADNGKV

SEQ ID NO: 82184 - protein, 9 aa, synthetic construct
  source 1..9: note = Seed: VGAGDVGKS (KRAS G13D)
FGAADPGKA

SEQ ID NO: 82185 - protein, 9 aa, synthetic construct
  source 1..9: note = Seed: VGAGDVGKS (KRAS G13D)
FGAADPGKI

SEQ ID NO: 82186 - protein, 9 aa, synthetic construct
  source 1..9: note = Seed: VGAGDVGKS (KRAS G13D)
FGAADPGKL

SEQ ID NO: 82187 - protein, 9 aa, synthetic construct
  source 1..9: note = Seed: VGAGDVGKS (KRAS G13D)
FGAADPGKM

SEQ ID NO: 82188 - protein, 9 aa, synthetic construct
  source 1..9: note = Seed: VGAGDVGKS (KRAS G13D)
FGAADPGKS

SEQ ID NO: 82189 - protein, 9 aa, synthetic construct
  source 1..9: note = Seed: VGAGDVGKS (KRAS G13D)
FGAADPGKT

SEQ ID NO: 82190 - protein, 9 aa, synthetic construct
  source 1..9: note = Seed: VGAGDVGKS (KRAS G13D)
FGAADPGKV

SEQ ID NO: 82191 - protein, 9 aa, synthetic construct
  source 1..9: note = Seed: VGAGDVGKS (KRAS G13D)
FGAADSGKA

SEQ ID NO: 82192 - protein, 9 aa, synthetic construct
  source 1..9: note = Seed: VGAGDVGKS (KRAS G13D)
FGAADSGKI

SEQ ID NO: 82193 - protein, 9 aa, synthetic construct
  source 1..9: note = Seed: VGAGDVGKS (KRAS G13D)
FGAADSGKL

SEQ ID NO: 82194 - protein, 9 aa, synthetic construct
  source 1..9: note = Seed: VGAGDVGKS (KRAS G13D)
FGAADSGKM

SEQ ID NO: 82195 - protein, 9 aa, synthetic construct
  source 1..9: note = Seed: VGAGDVGKS (KRAS G13D)
FGAADSGKS

SEQ ID NO: 82196 - protein, 9 aa, synthetic construct
  source 1..9: note = Seed: VGAGDVGKS (KRAS G13D)
FGAADSGKT

SEQ ID NO: 82197 - protein, 9 aa, synthetic construct
  source 1..9: note = Seed: VGAGDVGKS (KRAS G13D)
FGAADSGKV

SEQ ID NO: 82198 - protein, 9 aa, synthetic construct
  source 1..9: note = Seed: VGAGDVGKS (KRAS G13D)
FGAADTGKA

SEQ ID NO: 82199 - protein, 9 aa, synthetic construct
  source 1..9: note = Seed: VGAGDVGKS (KRAS G13D)
FGAADTGKI

SEQ ID NO: 82200 - protein, 9 aa, synthetic construct
  source 1..9: note = Seed: VGAGDVGKS (KRAS G13D)
FGAADTGKL

SEQ ID NO: 82201 - protein, 9 aa, synthetic construct
  source 1..9: note = Seed: VGAGDVGKS (KRAS G13D)
FGAADTGKM

SEQ ID NO: 82202 - protein, 9 aa, synthetic construct
  source 1..9: note = Seed: VGAGDVGKS (KRAS G13D)
FGAADTGKS

SEQ ID NO: 82203 - protein, 9 aa, synthetic construct
  source 1..9: note = Seed: VGAGDVGKS (KRAS G13D)
FGAADTGKT

SEQ ID NO: 82204 - protein, 9 aa, synthetic construct
  source 1..9: note = Seed: VGAGDVGKS (KRAS G13D)
FGAADTGKV

SEQ ID NO: 82205 - protein, 9 aa, synthetic construct
  source 1..9: note = Seed: VGAGDVGKS (KRAS G13D)
FGAADVGKA

SEQ ID NO: 82206 - protein, 9 aa, synthetic construct
  source 1..9: note = Seed: VGAGDVGKS (KRAS G13D)
FGAADVGKG

SEQ ID NO: 82207 - protein, 9 aa, synthetic construct
  source 1..9: note = Seed: VGAGDVGKS (KRAS G13D)
FGAADVGKI

SEQ ID NO: 82208 - protein, 9 aa, synthetic construct
  source 1..9: note = Seed: VGAGDVGKS (KRAS G13D)
FGAADVGKL

SEQ ID NO: 82209 - protein, 9 aa, synthetic construct
  source 1..9: note = Seed: VGAGDVGKS (KRAS G13D)
FGAADVGKM

SEQ ID NO: 82210 - protein, 9 aa, synthetic construct
  source 1..9: note = Seed: VGAGDVGKS (KRAS G13D)
FGAADVGKN

SEQ ID NO: 82211 - protein, 9 aa, synthetic construct
  source 1..9: note = Seed: VGAGDVGKS (KRAS G13D)
FGAADVGKS

SEQ ID NO: 82212 - protein, 9 aa, synthetic construct
  source 1..9: note = Seed: VGAGDVGKS (KRAS G13D)
FGAADVGKT

SEQ ID NO: 82213 - protein, 9 aa, synthetic construct
  source 1..9: note = Seed: VGAGDVGKS (KRAS G13D)
FGAADVGKV

SEQ ID NO: 82214 - protein, 9 aa, synthetic construct
  source 1..9: note = Seed: VGAGDVGKS (KRAS G13D)
FGACDAGKI

SEQ ID NO: 82215 - protein, 9 aa, synthetic construct
  source 1..9: note = Seed: VGAGDVGKS (KRAS G13D)
FGACDAGKL

SEQ ID NO: 82216 - protein, 9 aa, synthetic construct
  source 1..9: note = Seed: VGAGDVGKS (KRAS G13D)
FGACDAGKV

SEQ ID NO: 82217 - protein, 9 aa, synthetic construct
  source 1..9: note = Seed: VGAGDVGKS (KRAS G13D)
FGAEDAGKA

SEQ ID NO: 82218 - protein, 9 aa, synthetic construct
  source 1..9: note = Seed: VGAGDVGKS (KRAS G13D)
FGAEDAGKI

SEQ ID NO: 82219 - protein, 9 aa, synthetic construct
  source 1..9: note = Seed: VGAGDVGKS (KRAS G13D)
FGAEDAGKL

SEQ ID NO: 82220 - protein, 9 aa, synthetic construct
  source 1..9: note = Seed: VGAGDVGKS (KRAS G13D)
FGAEDAGKM

SEQ ID NO: 82221 - protein, 9 aa, synthetic construct
  source 1..9: note = Seed: VGAGDVGKS (KRAS G13D)
FGAEDAGKV

SEQ ID NO: 82222 - protein, 9 aa, synthetic construct
  source 1..9: note = Seed: VGAGDVGKS (KRAS G13D)
FGAEDGGKA

SEQ ID NO: 82223 - protein, 9 aa, synthetic construct
  source 1..9: note = Seed: VGAGDVGKS (KRAS G13D)
FGAEDGGKI

SEQ ID NO: 82224 - protein, 9 aa, synthetic construct
  source 1..9: note = Seed: VGAGDVGKS (KRAS G13D)
FGAEDGGKL

SEQ ID NO: 82225 - protein, 9 aa, synthetic construct
  source 1..9: note = Seed: VGAGDVGKS (KRAS G13D)
FGAEDGGKV

SEQ ID NO: 82226 - protein, 9 aa, synthetic construct
  source 1..9: note = Seed: VGAGDVGKS (KRAS G13D)
FGAEDSGKA

SEQ ID NO: 82227 - protein, 9 aa, synthetic construct
  source 1..9: note = Seed: VGAGDVGKS (KRAS G13D)
FGAEDSGKI

SEQ ID NO: 82228 - protein, 9 aa, synthetic construct
  source 1..9: note = Seed: VGAGDVGKS (KRAS G13D)
FGAEDSGKL

SEQ ID NO: 82229 - protein, 9 aa, synthetic construct
  source 1..9: note = Seed: VGAGDVGKS (KRAS G13D)
FGAEDSGKV

SEQ ID NO: 82230 - protein, 9 aa, synthetic construct
  source 1..9: note = Seed: VGAGDVGKS (KRAS G13D)
FGAFDAGKA

SEQ ID NO: 82231 - protein, 9 aa, synthetic construct
  source 1..9: note = Seed: VGAGDVGKS (KRAS G13D)
FGAFDAGKG

SEQ ID NO: 82232 - protein, 9 aa, synthetic construct
  source 1..9: note = Seed: VGAGDVGKS (KRAS G13D)
FGAFDAGKI

SEQ ID NO: 82233 - protein, 9 aa, synthetic construct
  source 1..9: note = Seed: VGAGDVGKS (KRAS G13D)
FGAFDAGKL

SEQ ID NO: 82234 - protein, 9 aa, synthetic construct
  source 1..9: note = Seed: VGAGDVGKS (KRAS G13D)
FGAFDAGKM

SEQ ID NO: 82235 - protein, 9 aa, synthetic construct
  source 1..9: note = Seed: VGAGDVGKS (KRAS G13D)
FGAFDAGKS

SEQ ID NO: 82236 - protein, 9 aa, synthetic construct
  source 1..9: note = Seed: VGAGDVGKS (KRAS G13D)
FGAFDAGKT

SEQ ID NO: 82237 - protein, 9 aa, synthetic construct
  source 1..9: note = Seed: VGAGDVGKS (KRAS G13D)
FGAFDAGKV

SEQ ID NO: 82238 - protein, 9 aa, synthetic construct
  source 1..9: note = Seed: VGAGDVGKS (KRAS G13D)
FGAFDGGKA

SEQ ID NO: 82239 - protein, 9 aa, synthetic construct
  source 1..9: note = Seed: VGAGDVGKS (KRAS G13D)
FGAFDGGKI

SEQ ID NO: 82240 - protein, 9 aa, synthetic construct
  source 1..9: note = Seed: VGAGDVGKS (KRAS G13D)
FGAFDGGKL

SEQ ID NO: 82241 - protein, 9 aa, synthetic construct
  source 1..9: note = Seed: VGAGDVGKS (KRAS G13D)
FGAFDGGKV

SEQ ID NO: 82242 - protein, 9 aa, synthetic construct
  source 1..9: note = Seed: VGAGDVGKS (KRAS G13D)
FGAFDPGKA

SEQ ID NO: 82243 - protein, 9 aa, synthetic construct
  source 1..9: note = Seed: VGAGDVGKS (KRAS G13D)
FGAFDPGKI

SEQ ID NO: 82244 - protein, 9 aa, synthetic construct
  source 1..9: note = Seed: VGAGDVGKS (KRAS G13D)
FGAFDPGKL

SEQ ID NO: 82245 - protein, 9 aa, synthetic construct
  source 1..9: note = Seed: VGAGDVGKS (KRAS G13D)
FGAFDPGKV

SEQ ID NO: 82246 - protein, 9 aa, synthetic construct
  source 1..9: note = Seed: VGAGDVGKS (KRAS G13D)
FGAFDSGKA

SEQ ID NO: 82247 - protein, 9 aa, synthetic construct
  source 1..9: note = Seed: VGAGDVGKS (KRAS G13D)
FGAFDSGKI

SEQ ID NO: 82248 - protein, 9 aa, synthetic construct
  source 1..9: note = Seed: VGAGDVGKS (KRAS G13D)
FGAFDSGKL

SEQ ID NO: 82249 - protein, 9 aa, synthetic construct
  source 1..9: note = Seed: VGAGDVGKS (KRAS G13D)
FGAFDSGKS

SEQ ID NO: 82250 - protein, 9 aa, synthetic construct
  source 1..9: note = Seed: VGAGDVGKS (KRAS G13D)
FGAFDSGKV

SEQ ID NO: 82251 - protein, 9 aa, synthetic construct
  source 1..9: note = Seed: VGAGDVGKS (KRAS G13D)
FGAFDTGKA

SEQ ID NO: 82252 - protein, 9 aa, synthetic construct
  source 1..9: note = Seed: VGAGDVGKS (KRAS G13D)
FGAFDTGKV

SEQ ID NO: 82253 - protein, 9 aa, synthetic construct
  source 1..9: note = Seed: VGAGDVGKS (KRAS G13D)
FGAGDAGKA

SEQ ID NO: 82254 - protein, 9 aa, synthetic construct
  source 1..9: note = Seed: VGAGDVGKS (KRAS G13D)
FGAGDAGKG

SEQ ID NO: 82255 - protein, 9 aa, synthetic construct
  source 1..9: note = Seed: VGAGDVGKS (KRAS G13D)
FGAGDAGKI

SEQ ID NO: 82256 - protein, 9 aa, synthetic construct
  source 1..9: note = Seed: VGAGDVGKS (KRAS G13D)
FGAGDAGKL

SEQ ID NO: 82257 - protein, 9 aa, synthetic construct
  source 1..9: note = Seed: VGAGDVGKS (KRAS G13D)
FGAGDAGKS

SEQ ID NO: 82258 - protein, 9 aa, synthetic construct
  source 1..9: note = Seed: VGAGDVGKS (KRAS G13D)
FGAGDAGKT

SEQ ID NO: 82259 - protein, 9 aa, synthetic construct
  source 1..9: note = Seed: VGAGDVGKS (KRAS G13D)
FGAGDAGKV

SEQ ID NO: 82260 - protein, 9 aa, synthetic construct
  source 1..9: note = Seed: VGAGDVGKS (KRAS G13D)
FGAGDIGKA

SEQ ID NO: 82261 - protein, 9 aa, synthetic construct
  source 1..9: note = Seed: VGAGDVGKS (KRAS G13D)
FGAGDIGKS

SEQ ID NO: 82262 - protein, 9 aa, synthetic construct
  source 1..9: note = Seed: VGAGDVGKS (KRAS G13D)
FGAGDIGKT

SEQ ID NO: 82263 - protein, 9 aa, synthetic construct
  source 1..9: note = Seed: VGAGDVGKS (KRAS G13D)
FGAGDIGKV

SEQ ID NO: 82264 - protein, 9 aa, synthetic construct
  source 1..9: note = Seed: VGAGDVGKS (KRAS G13D)
FGAGDPGKA

SEQ ID NO: 82265 - protein, 9 aa, synthetic construct
  source 1..9: note = Seed: VGAGDVGKS (KRAS G13D)
FGAGDPGKI

SEQ ID NO: 82266 - protein, 9 aa, synthetic construct
  source 1..9: note = Seed: VGAGDVGKS (KRAS G13D)
FGAGDPGKS

SEQ ID NO: 82267 - protein, 9 aa, synthetic construct
  source 1..9: note = Seed: VGAGDVGKS (KRAS G13D)
FGAGDPGKT

SEQ ID NO: 82268 - protein, 9 aa, synthetic construct
  source 1..9: note = Seed: VGAGDVGKS (KRAS G13D)
FGAGDPGKV

SEQ ID NO: 82269 - protein, 9 aa, synthetic construct
  source 1..9: note = Seed: VGAGDVGKS (KRAS G13D)
FGAGDSGKA

SEQ ID NO: 82270 - protein, 9 aa, synthetic construct
  source 1..9: note = Seed: VGAGDVGKS (KRAS G13D)
FGAGDSGKV

SEQ ID NO: 82271 - protein, 9 aa, synthetic construct
  source 1..9: note = Seed: VGAGDVGKS (KRAS G13D)
FGAGDTGKA

SEQ ID NO: 82272 - protein, 9 aa, synthetic construct
  source 1..9: note = Seed: VGAGDVGKS (KRAS G13D)
FGAGDVGKA

SEQ ID NO: 82273 - protein, 9 aa, synthetic construct
  source 1..9: note = Seed: VGAGDVGKS (KRAS G13D)
FGAGDVGKI

SEQ ID NO: 82274 - protein, 9 aa, synthetic construct
  source 1..9: note = Seed: VGAGDVGKS (KRAS G13D)
FGAGDVGKS

SEQ ID NO: 82275 - protein, 9 aa, synthetic construct
  source 1..9: note = Seed: VGAGDVGKS (KRAS G13D)
FGAGDVGKT

SEQ ID NO: 82276 - protein, 9 aa, synthetic construct
  source 1..9: note = Seed: VGAGDVGKS (KRAS G13D)
FGAGDVGKV

SEQ ID NO: 82277 - protein, 9 aa, synthetic construct
  source 1..9: note = Seed: VGAGDVGKS (KRAS G13D)
FGAHDAGKA

SEQ ID NO: 82278 - protein, 9 aa, synthetic construct
  source 1..9: note = Seed: VGAGDVGKS (KRAS G13D)
FGAHDAGKI

SEQ ID NO: 82279 - protein, 9 aa, synthetic construct
  source 1..9: note = Seed: VGAGDVGKS (KRAS G13D)
FGAHDAGKL

SEQ ID NO: 82280 - protein, 9 aa, synthetic construct
  source 1..9: note = Seed: VGAGDVGKS (KRAS G13D)
FGAHDAGKV

SEQ ID NO: 82281 - protein, 9 aa, synthetic construct
  source 1..9: note = Seed: VGAGDVGKS (KRAS G13D)
FGAHDSGKL

SEQ ID NO: 82282 - protein, 9 aa, synthetic construct
  source 1..9: note = Seed: VGAGDVGKS (KRAS G13D)
FGAIDAGKA

SEQ ID NO: 82283 - protein, 9 aa, synthetic construct
  source 1..9: note = Seed: VGAGDVGKS (KRAS G13D)
FGAIDAGKC

SEQ ID NO: 82284 - protein, 9 aa, synthetic construct
  source 1..9: note = Seed: VGAGDVGKS (KRAS G13D)
FGAIDAGKF

SEQ ID NO: 82285 - protein, 9 aa, synthetic construct
  source 1..9: note = Seed: VGAGDVGKS (KRAS G13D)
FGAIDAGKG

SEQ ID NO: 82286 - protein, 9 aa, synthetic construct
  source 1..9: note = Seed: VGAGDVGKS (KRAS G13D)
FGAIDAGKH

SEQ ID NO: 82287 - protein, 9 aa, synthetic construct
  source 1..9: note = Seed: VGAGDVGKS (KRAS G13D)
FGAIDAGKI

SEQ ID NO: 82288 - protein, 9 aa, synthetic construct
  source 1..9: note = Seed: VGAGDVGKS (KRAS G13D)
FGAIDAGKL

SEQ ID NO: 82289 - protein, 9 aa, synthetic construct
  source 1..9: note = Seed: VGAGDVGKS (KRAS G13D)
FGAIDAGKM

SEQ ID NO: 82290 - protein, 9 aa, synthetic construct
  source 1..9: note = Seed: VGAGDVGKS (KRAS G13D)
FGAIDAGKN

SEQ ID NO: 82291 - protein, 9 aa, synthetic construct
  source 1..9: note = Seed: VGAGDVGKS (KRAS G13D)
FGAIDAGKP

SEQ ID NO: 82292 - protein, 9 aa, synthetic construct
  source 1..9: note = Seed: VGAGDVGKS (KRAS G13D)
FGAIDAGKQ

SEQ ID NO: 82293 - protein, 9 aa, synthetic construct
  source 1..9: note = Seed: VGAGDVGKS (KRAS G13D)
FGAIDAGKR

SEQ ID NO: 82294 - protein, 9 aa, synthetic construct
  source 1..9: note = Seed: VGAGDVGKS (KRAS G13D)
FGAIDAGKS

SEQ ID NO: 82295 - protein, 9 aa, synthetic construct
  source 1..9: note = Seed: VGAGDVGKS (KRAS G13D)
FGAIDAGKT

SEQ ID NO: 82296 - protein, 9 aa, synthetic construct
  source 1..9: note = Seed: VGAGDVGKS (KRAS G13D)
FGAIDAGKV

SEQ ID NO: 82297 - protein, 9 aa, synthetic construct
  source 1..9: note = Seed: VGAGDVGKS (KRAS G13D)
FGAIDAGKY

SEQ ID NO: 82298 - protein, 9 aa, synthetic construct
  source 1..9: note = Seed: VGAGDVGKS (KRAS G13D)
FGAIDGGKA

SEQ ID NO: 82299 - protein, 9 aa, synthetic construct
  source 1..9: note = Seed: VGAGDVGKS (KRAS G13D)
FGAIDGGKC

SEQ ID NO: 82300 - protein, 9 aa, synthetic construct
  source 1..9: note = Seed: VGAGDVGKS (KRAS G13D)
FGAIDGGKG

SEQ ID NO: 82301 - protein, 9 aa, synthetic construct
  source 1..9: note = Seed: VGAGDVGKS (KRAS G13D)
FGAIDGGKI

SEQ ID NO: 82302 - protein, 9 aa, synthetic construct
  source 1..9: note = Seed: VGAGDVGKS (KRAS G13D)
FGAIDGGKL

SEQ ID NO: 82303 - protein, 9 aa, synthetic construct
  source 1..9: note = Seed: VGAGDVGKS (KRAS G13D)
FGAIDGGKM

SEQ ID NO: 82304 - protein, 9 aa, synthetic construct
  source 1..9: note = Seed: VGAGDVGKS (KRAS G13D)
FGAIDGGKN

SEQ ID NO: 82305 - protein, 9 aa, synthetic construct
  source 1..9: note = Seed: VGAGDVGKS (KRAS G13D)
FGAIDGGKS

SEQ ID NO: 82306 - protein, 9 aa, synthetic construct
  source 1..9: note = Seed: VGAGDVGKS (KRAS G13D)
FGAIDGGKT

SEQ ID NO: 82307 - protein, 9 aa, synthetic construct
  source 1..9: note = Seed: VGAGDVGKS (KRAS G13D)
FGAIDGGKV

SEQ ID NO: 82308 - protein, 9 aa, synthetic construct
  source 1..9: note = Seed: VGAGDVGKS (KRAS G13D)
FGAIDIGKA

SEQ ID NO: 82309 - protein, 9 aa, synthetic construct
  source 1..9: note = Seed: VGAGDVGKS (KRAS G13D)
FGAIDIGKI

SEQ ID NO: 82310 - protein, 9 aa, synthetic construct
  source 1..9: note = Seed: VGAGDVGKS (KRAS G13D)
FGAIDIGKV

SEQ ID NO: 82311 - protein, 9 aa, synthetic construct
  source 1..9: note = Seed: VGAGDVGKS (KRAS G13D)
FGAIDLGKA

SEQ ID NO: 82312 - protein, 9 aa, synthetic construct
  source 1..9: note = Seed: VGAGDVGKS (KRAS G13D)
FGAIDNGKA

SEQ ID NO: 82313 - protein, 9 aa, synthetic construct
  source 1..9: note = Seed: VGAGDVGKS (KRAS G13D)
FGAIDNGKI

SEQ ID NO: 82314 - protein, 9 aa, synthetic construct
  source 1..9: note = Seed: VGAGDVGKS (KRAS G13D)
FGAIDNGKL

SEQ ID NO: 82315 - protein, 9 aa, synthetic construct
  source 1..9: note = Seed: VGAGDVGKS (KRAS G13D)
FGAIDNGKM

SEQ ID NO: 82316 - protein, 9 aa, synthetic construct
  source 1..9: note = Seed: VGAGDVGKS (KRAS G13D)
FGAIDNGKS

SEQ ID NO: 82317 - protein, 9 aa, synthetic construct
  source 1..9: note = Seed: VGAGDVGKS (KRAS G13D)
FGAIDNGKT

SEQ ID NO: 82318 - protein, 9 aa, synthetic construct
  source 1..9: note = Seed: VGAGDVGKS (KRAS G13D)
FGAIDNGKV

SEQ ID NO: 82319 - protein, 9 aa, synthetic construct
  source 1..9: note = Seed: VGAGDVGKS (KRAS G13D)
FGAIDPGKA

SEQ ID NO: 82320 - protein, 9 aa, synthetic construct
  source 1..9: note = Seed: VGAGDVGKS (KRAS G13D)
FGAIDPGKG

SEQ ID NO: 82321 - protein, 9 aa, synthetic construct
  source 1..9: note = Seed: VGAGDVGKS (KRAS G13D)
FGAIDPGKI

SEQ ID NO: 82322 - protein, 9 aa, synthetic construct
  source 1..9: note = Seed: VGAGDVGKS (KRAS G13D)
FGAIDPGKL

SEQ ID NO: 82323 - protein, 9 aa, synthetic construct
  source 1..9: note = Seed: VGAGDVGKS (KRAS G13D)
FGAIDPGKM

SEQ ID NO: 82324 - protein, 9 aa, synthetic construct
  source 1..9: note = Seed: VGAGDVGKS (KRAS G13D)
FGAIDPGKN

SEQ ID NO: 82325 - protein, 9 aa, synthetic construct
  source 1..9: note = Seed: VGAGDVGKS (KRAS G13D)
FGAIDPGKS

SEQ ID NO: 82326 - protein, 9 aa, synthetic construct
  source 1..9: note = Seed: VGAGDVGKS (KRAS G13D)
FGAIDPGKT

SEQ ID NO: 82327 - protein, 9 aa, synthetic construct
  source 1..9: note = Seed: VGAGDVGKS (KRAS G13D)
FGAIDPGKV

SEQ ID NO: 82328 - protein, 9 aa, synthetic construct
  source 1..9: note = Seed: VGAGDVGKS (KRAS G13D)
FGAIDSGKA

SEQ ID NO: 82329 - protein, 9 aa, synthetic construct
  source 1..9: note = Seed: VGAGDVGKS (KRAS G13D)
FGAIDSGKC

SEQ ID NO: 82330 - protein, 9 aa, synthetic construct
  source 1..9: note = Seed: VGAGDVGKS (KRAS G13D)
FGAIDSGKG

SEQ ID NO: 82331 - protein, 9 aa, synthetic construct
  source 1..9: note = Seed: VGAGDVGKS (KRAS G13D)
FGAIDSGKI

SEQ ID NO: 82332 - protein, 9 aa, synthetic construct
  source 1..9: note = Seed: VGAGDVGKS (KRAS G13D)
FGAIDSGKL

SEQ ID NO: 82333 - protein, 9 aa, synthetic construct
  source 1..9: note = Seed: VGAGDVGKS (KRAS G13D)
FGAIDSGKM

SEQ ID NO: 82334 - protein, 9 aa, synthetic construct
  source 1..9: note = Seed: VGAGDVGKS (KRAS G13D)
FGAIDSGKN

SEQ ID NO: 82335 - protein, 9 aa, synthetic construct
  source 1..9: note = Seed: VGAGDVGKS (KRAS G13D)
FGAIDSGKS

SEQ ID NO: 82336 - protein, 9 aa, synthetic construct
  source 1..9: note = Seed: VGAGDVGKS (KRAS G13D)
FGAIDSGKT

SEQ ID NO: 82337 - protein, 9 aa, synthetic construct
  source 1..9: note = Seed: VGAGDVGKS (KRAS G13D)
FGAIDSGKV

SEQ ID NO: 82338 - protein, 9 aa, synthetic construct
  source 1..9: note = Seed: VGAGDVGKS (KRAS G13D)
FGAIDTGKA

SEQ ID NO: 82339 - protein, 9 aa, synthetic construct
  source 1..9: note = Seed: VGAGDVGKS (KRAS G13D)
FGAIDTGKI

SEQ ID NO: 82340 - protein, 9 aa, synthetic construct
  source 1..9: note = Seed: VGAGDVGKS (KRAS G13D)
FGAIDTGKL

SEQ ID NO: 82341 - protein, 9 aa, synthetic construct
  source 1..9: note = Seed: VGAGDVGKS (KRAS G13D)
FGAIDTGKM

SEQ ID NO: 82342 - protein, 9 aa, synthetic construct
  source 1..9: note = Seed: VGAGDVGKS (KRAS G13D)
FGAIDTGKS

SEQ ID NO: 82343 - protein, 9 aa, synthetic construct
  source 1..9: note = Seed: VGAGDVGKS (KRAS G13D)
FGAIDTGKT

SEQ ID NO: 82344 - protein, 9 aa, synthetic construct
  source 1..9: note = Seed: VGAGDVGKS (KRAS G13D)
FGAIDTGKV

SEQ ID NO: 82345 - protein, 9 aa, synthetic construct
  source 1..9: note = Seed: VGAGDVGKS (KRAS G13D)
FGAIDVGKA

SEQ ID NO: 82346 - protein, 9 aa, synthetic construct
  source 1..9: note = Seed: VGAGDVGKS (KRAS G13D)
FGAIDVGKI

SEQ ID NO: 82347 - protein, 9 aa, synthetic construct
  source 1..9: note = Seed: VGAGDVGKS (KRAS G13D)
FGAIDVGKL

SEQ ID NO: 82348 - protein, 9 aa, synthetic construct
  source 1..9: note = Seed: VGAGDVGKS (KRAS G13D)
FGAIDVGKM

SEQ ID NO: 82349 - protein, 9 aa, synthetic construct
  source 1..9: note = Seed: VGAGDVGKS (KRAS G13D)
FGAIDVGKS

SEQ ID NO: 82350 - protein, 9 aa, synthetic construct
  source 1..9: note = Seed: VGAGDVGKS (KRAS G13D)
FGAIDVGKT

SEQ ID NO: 82351 - protein, 9 aa, synthetic construct
  source 1..9: note = Seed: VGAGDVGKS (KRAS G13D)
FGAIDVGKV

SEQ ID NO: 82352 - protein, 9 aa, synthetic construct
  source 1..9: note = Seed: VGAGDVGKS (KRAS G13D)
FGALDAGKA

SEQ ID NO: 82353 - protein, 9 aa, synthetic construct
  source 1..9: note = Seed: VGAGDVGKS (KRAS G13D)
FGALDAGKC

SEQ ID NO: 82354 - protein, 9 aa, synthetic construct
  source 1..9: note = Seed: VGAGDVGKS (KRAS G13D)
FGALDAGKF

SEQ ID NO: 82355 - protein, 9 aa, synthetic construct
  source 1..9: note = Seed: VGAGDVGKS (KRAS G13D)
FGALDAGKG

SEQ ID NO: 82356 - protein, 9 aa, synthetic construct
  source 1..9: note = Seed: VGAGDVGKS (KRAS G13D)
FGALDAGKH

SEQ ID NO: 82357 - protein, 9 aa, synthetic construct
  source 1..9: note = Seed: VGAGDVGKS (KRAS G13D)
FGALDAGKI

SEQ ID NO: 82358 - protein, 9 aa, synthetic construct
  source 1..9: note = Seed: VGAGDVGKS (KRAS G13D)
FGALDAGKK

SEQ ID NO: 82359 - protein, 9 aa, synthetic construct
  source 1..9: note = Seed: VGAGDVGKS (KRAS G13D)
FGALDAGKL

SEQ ID NO: 82360 - protein, 9 aa, synthetic construct
  source 1..9: note = Seed: VGAGDVGKS (KRAS G13D)
FGALDAGKM

SEQ ID NO: 82361 - protein, 9 aa, synthetic construct
  source 1..9: note = Seed: VGAGDVGKS (KRAS G13D)
FGALDAGKN

SEQ ID NO: 82362 - protein, 9 aa, synthetic construct
  source 1..9: note = Seed: VGAGDVGKS (KRAS G13D)
FGALDAGKP

SEQ ID NO: 82363 - protein, 9 aa, synthetic construct
  source 1..9: note = Seed: VGAGDVGKS (KRAS G13D)
FGALDAGKQ

SEQ ID NO: 82364 - protein, 9 aa, synthetic construct
  source 1..9: note = Seed: VGAGDVGKS (KRAS G13D)
FGALDAGKR

SEQ ID NO: 82365 - protein, 9 aa, synthetic construct
  source 1..9: note = Seed: VGAGDVGKS (KRAS G13D)
FGALDAGKS

SEQ ID NO: 82366 - protein, 9 aa, synthetic construct
  source 1..9: note = Seed: VGAGDVGKS (KRAS G13D)
FGALDAGKT

SEQ ID NO: 82367 - protein, 9 aa, synthetic construct
  source 1..9: note = Seed: VGAGDVGKS (KRAS G13D)
FGALDAGKV

SEQ ID NO: 82368 - protein, 9 aa, synthetic construct
  source 1..9: note = Seed: VGAGDVGKS (KRAS G13D)
FGALDAGKW

SEQ ID NO: 82369 - protein, 9 aa, synthetic construct
  source 1..9: note = Seed: VGAGDVGKS (KRAS G13D)
FGALDAGKY

SEQ ID NO: 82370 - protein, 9 aa, synthetic construct
  source 1..9: note = Seed: VGAGDVGKS (KRAS G13D)
FGALDCGKV

SEQ ID NO: 82371 - protein, 9 aa, synthetic construct
  source 1..9: note = Seed: VGAGDVGKS (KRAS G13D)
FGALDEGKL

SEQ ID NO: 82372 - protein, 9 aa, synthetic construct
  source 1..9: note = Seed: VGAGDVGKS (KRAS G13D)
FGALDGGKA

SEQ ID NO: 82373 - protein, 9 aa, synthetic construct
  source 1..9: note = Seed: VGAGDVGKS (KRAS G13D)
FGALDGGKC

SEQ ID NO: 82374 - protein, 9 aa, synthetic construct
  source 1..9: note = Seed: VGAGDVGKS (KRAS G13D)
FGALDGGKF

SEQ ID NO: 82375 - protein, 9 aa, synthetic construct
  source 1..9: note = Seed: VGAGDVGKS (KRAS G13D)
FGALDGGKG

SEQ ID NO: 82376 - protein, 9 aa, synthetic construct
  source 1..9: note = Seed: VGAGDVGKS (KRAS G13D)
FGALDGGKH

SEQ ID NO: 82377 - protein, 9 aa, synthetic construct
  source 1..9: note = Seed: VGAGDVGKS (KRAS G13D)
FGALDGGKI

SEQ ID NO: 82378 - protein, 9 aa, synthetic construct
  source 1..9: note = Seed: VGAGDVGKS (KRAS G13D)
FGALDGGKL

SEQ ID NO: 82379 - protein, 9 aa, synthetic construct
  source 1..9: note = Seed: VGAGDVGKS (KRAS G13D)
FGALDGGKM

SEQ ID NO: 82380 - protein, 9 aa, synthetic construct
  source 1..9: note = Seed: VGAGDVGKS (KRAS G13D)
FGALDGGKN

SEQ ID NO: 82381 - protein, 9 aa, synthetic construct
  source 1..9: note = Seed: VGAGDVGKS (KRAS G13D)
FGALDGGKP

SEQ ID NO: 82382 - protein, 9 aa, synthetic construct
  source 1..9: note = Seed: VGAGDVGKS (KRAS G13D)
FGALDGGKQ

SEQ ID NO: 82383 - protein, 9 aa, synthetic construct
  source 1..9: note = Seed: VGAGDVGKS (KRAS G13D)
FGALDGGKS

SEQ ID NO: 82384 - protein, 9 aa, synthetic construct
  source 1..9: note = Seed: VGAGDVGKS (KRAS G13D)
FGALDGGKT

SEQ ID NO: 82385 - protein, 9 aa, synthetic construct
  source 1..9: note = Seed: VGAGDVGKS (KRAS G13D)
FGALDGGKV

SEQ ID NO: 82386 - protein, 9 aa, synthetic construct
  source 1..9: note = Seed: VGAGDVGKS (KRAS G13D)
FGALDGGKY

SEQ ID NO: 82387 - protein, 9 aa, synthetic construct
  source 1..9: note = Seed: VGAGDVGKS (KRAS G13D)
FGALDHGKA

SEQ ID NO: 82388 - protein, 9 aa, synthetic construct
  source 1..9: note = Seed: VGAGDVGKS (KRAS G13D)
FGALDHGKI

SEQ ID NO: 82389 - protein, 9 aa, synthetic construct
  source 1..9: note = Seed: VGAGDVGKS (KRAS G13D)
FGALDHGKL

SEQ ID NO: 82390 - protein, 9 aa, synthetic construct
  source 1..9: note = Seed: VGAGDVGKS (KRAS G13D)
FGALDHGKV

SEQ ID NO: 82391 - protein, 9 aa, synthetic construct
  source 1..9: note = Seed: VGAGDVGKS (KRAS G13D)
FGALDIGKA

SEQ ID NO: 82392 - protein, 9 aa, synthetic construct
  source 1..9: note = Seed: VGAGDVGKS (KRAS G13D)
FGALDIGKI

SEQ ID NO: 82393 - protein, 9 aa, synthetic construct
  source 1..9: note = Seed: VGAGDVGKS (KRAS G13D)
FGALDIGKL

SEQ ID NO: 82394 - protein, 9 aa, synthetic construct
  source 1..9: note = Seed: VGAGDVGKS (KRAS G13D)
FGALDIGKM

SEQ ID NO: 82395 - protein, 9 aa, synthetic construct
  source 1..9: note = Seed: VGAGDVGKS (KRAS G13D)
FGALDIGKS

SEQ ID NO: 82396 - protein, 9 aa, synthetic construct
  source 1..9: note = Seed: VGAGDVGKS (KRAS G13D)
FGALDIGKT

SEQ ID NO: 82397 - protein, 9 aa, synthetic construct
  source 1..9: note = Seed: VGAGDVGKS (KRAS G13D)
FGALDIGKV

SEQ ID NO: 82398 - protein, 9 aa, synthetic construct
  source 1..9: note = Seed: VGAGDVGKS (KRAS G13D)
FGALDLGKA

SEQ ID NO: 82399 - protein, 9 aa, synthetic construct
  source 1..9: note = Seed: VGAGDVGKS (KRAS G13D)
FGALDLGKI

SEQ ID NO: 82400 - protein, 9 aa, synthetic construct
  source 1..9: note = Seed: VGAGDVGKS (KRAS G13D)
FGALDLGKV

SEQ ID NO: 82401 - protein, 9 aa, synthetic construct
  source 1..9: note = Seed: VGAGDVGKS (KRAS G13D)
FGALDMGKA

SEQ ID NO: 82402 - protein, 9 aa, synthetic construct
  source 1..9: note = Seed: VGAGDVGKS (KRAS G13D)
FGALDMGKI

SEQ ID NO: 82403 - protein, 9 aa, synthetic construct
  source 1..9: note = Seed: VGAGDVGKS (KRAS G13D)
FGALDMGKL

SEQ ID NO: 82404 - protein, 9 aa, synthetic construct
  source 1..9: note = Seed: VGAGDVGKS (KRAS G13D)
FGALDMGKV

SEQ ID NO: 82405 - protein, 9 aa, synthetic construct
  source 1..9: note = Seed: VGAGDVGKS (KRAS G13D)
FGALDNGKA

SEQ ID NO: 82406 - protein, 9 aa, synthetic construct
  source 1..9: note = Seed: VGAGDVGKS (KRAS G13D)
FGALDNGKC

SEQ ID NO: 82407 - protein, 9 aa, synthetic construct
  source 1..9: note = Seed: VGAGDVGKS (KRAS G13D)
FGALDNGKF

SEQ ID NO: 82408 - protein, 9 aa, synthetic construct
  source 1..9: note = Seed: VGAGDVGKS (KRAS G13D)
FGALDNGKG

SEQ ID NO: 82409 - protein, 9 aa, synthetic construct
  source 1..9: note = Seed: VGAGDVGKS (KRAS G13D)
FGALDNGKI

SEQ ID NO: 82410 - protein, 9 aa, synthetic construct
  source 1..9: note = Seed: VGAGDVGKS (KRAS G13D)
FGALDNGKL

SEQ ID NO: 82411 - protein, 9 aa, synthetic construct
  source 1..9: note = Seed: VGAGDVGKS (KRAS G13D)
FGALDNGKM

SEQ ID NO: 82412 - protein, 9 aa, synthetic construct
  source 1..9: note = Seed: VGAGDVGKS (KRAS G13D)
FGALDNGKN

SEQ ID NO: 82413 - protein, 9 aa, synthetic construct
  source 1..9: note = Seed: VGAGDVGKS (KRAS G13D)
FGALDNGKS

SEQ ID NO: 82414 - protein, 9 aa, synthetic construct
  source 1..9: note = Seed: VGAGDVGKS (KRAS G13D)
FGALDNGKT

SEQ ID NO: 82415 - protein, 9 aa, synthetic construct
  source 1..9: note = Seed: VGAGDVGKS (KRAS G13D)
FGALDNGKV

SEQ ID NO: 82416 - protein, 9 aa, synthetic construct
  source 1..9: note = Seed: VGAGDVGKS (KRAS G13D)
FGALDPGKA

SEQ ID NO: 82417 - protein, 9 aa, synthetic construct
  source 1..9: note = Seed: VGAGDVGKS (KRAS G13D)
FGALDPGKC

SEQ ID NO: 82418 - protein, 9 aa, synthetic construct
  source 1..9: note = Seed: VGAGDVGKS (KRAS G13D)
FGALDPGKF

SEQ ID NO: 82419 - protein, 9 aa, synthetic construct
  source 1..9: note = Seed: VGAGDVGKS (KRAS G13D)
FGALDPGKG

SEQ ID NO: 82420 - protein, 9 aa, synthetic construct
  source 1..9: note = Seed: VGAGDVGKS (KRAS G13D)
FGALDPGKH

SEQ ID NO: 82421 - protein, 9 aa, synthetic construct
  source 1..9: note = Seed: VGAGDVGKS (KRAS G13D)
FGALDPGKI

SEQ ID NO: 82422 - protein, 9 aa, synthetic construct
  source 1..9: note = Seed: VGAGDVGKS (KRAS G13D)
FGALDPGKL

SEQ ID NO: 82423 - protein, 9 aa, synthetic construct
  source 1..9: note = Seed: VGAGDVGKS (KRAS G13D)
FGALDPGKM

SEQ ID NO: 82424 - protein, 9 aa, synthetic construct
  source 1..9: note = Seed: VGAGDVGKS (KRAS G13D)
FGALDPGKN

SEQ ID NO: 82425 - protein, 9 aa, synthetic construct
  source 1..9: note = Seed: VGAGDVGKS (KRAS G13D)
FGALDPGKP

SEQ ID NO: 82426 - protein, 9 aa, synthetic construct
  source 1..9: note = Seed: VGAGDVGKS (KRAS G13D)
FGALDPGKQ

SEQ ID NO: 82427 - protein, 9 aa, synthetic construct
  source 1..9: note = Seed: VGAGDVGKS (KRAS G13D)
FGALDPGKS

SEQ ID NO: 82428 - protein, 9 aa, synthetic construct
  source 1..9: note = Seed: VGAGDVGKS (KRAS G13D)
FGALDPGKT

SEQ ID NO: 82429 - protein, 9 aa, synthetic construct
  source 1..9: note = Seed: VGAGDVGKS (KRAS G13D)
FGALDPGKV

SEQ ID NO: 82430 - protein, 9 aa, synthetic construct
  source 1..9: note = Seed: VGAGDVGKS (KRAS G13D)
FGALDPGKY

SEQ ID NO: 82431 - protein, 9 aa, synthetic construct
  source 1..9: note = Seed: VGAGDVGKS (KRAS G13D)
FGALDQGKI

SEQ ID NO: 82432 - protein, 9 aa, synthetic construct
  source 1..9: note = Seed: VGAGDVGKS (KRAS G13D)
FGALDQGKL

SEQ ID NO: 82433 - protein, 9 aa, synthetic construct
  source 1..9: note = Seed: VGAGDVGKS (KRAS G13D)
FGALDQGKV

SEQ ID NO: 82434 - protein, 9 aa, synthetic construct
  source 1..9: note = Seed: VGAGDVGKS (KRAS G13D)
FGALDSGKA

SEQ ID NO: 82435 - protein, 9 aa, synthetic construct
  source 1..9: note = Seed: VGAGDVGKS (KRAS G13D)
FGALDSGKC

SEQ ID NO: 82436 - protein, 9 aa, synthetic construct
  source 1..9: note = Seed: VGAGDVGKS (KRAS G13D)
FGALDSGKF

SEQ ID NO: 82437 - protein, 9 aa, synthetic construct
  source 1..9: note = Seed: VGAGDVGKS (KRAS G13D)
FGALDSGKG

SEQ ID NO: 82438 - protein, 9 aa, synthetic construct
  source 1..9: note = Seed: VGAGDVGKS (KRAS G13D)
FGALDSGKH

SEQ ID NO: 82439 - protein, 9 aa, synthetic construct
  source 1..9: note = Seed: VGAGDVGKS (KRAS G13D)
FGALDSGKI

SEQ ID NO: 82440 - protein, 9 aa, synthetic construct
  source 1..9: note = Seed: VGAGDVGKS (KRAS G13D)
FGALDSGKL

SEQ ID NO: 82441 - protein, 9 aa, synthetic construct
  source 1..9: note = Seed: VGAGDVGKS (KRAS G13D)
FGALDSGKM

SEQ ID NO: 82442 - protein, 9 aa, synthetic construct
  source 1..9: note = Seed: VGAGDVGKS (KRAS G13D)
FGALDSGKN

SEQ ID NO: 82443 - protein, 9 aa, synthetic construct
  source 1..9: note = Seed: VGAGDVGKS (KRAS G13D)
FGALDSGKP

SEQ ID NO: 82444 - protein, 9 aa, synthetic construct
  source 1..9: note = Seed: VGAGDVGKS (KRAS G13D)
FGALDSGKQ

SEQ ID NO: 82445 - protein, 9 aa, synthetic construct
  source 1..9: note = Seed: VGAGDVGKS (KRAS G13D)
FGALDSGKR

SEQ ID NO: 82446 - protein, 9 aa, synthetic construct
  source 1..9: note = Seed: VGAGDVGKS (KRAS G13D)
FGALDSGKS

SEQ ID NO: 82447 - protein, 9 aa, synthetic construct
  source 1..9: note = Seed: VGAGDVGKS (KRAS G13D)
FGALDSGKT

SEQ ID NO: 82448 - protein, 9 aa, synthetic construct
  source 1..9: note = Seed: VGAGDVGKS (KRAS G13D)
FGALDSGKV

SEQ ID NO: 82449 - protein, 9 aa, synthetic construct
  source 1..9: note = Seed: VGAGDVGKS (KRAS G13D)
FGALDSGKW

SEQ ID NO: 82450 - protein, 9 aa, synthetic construct
  source 1..9: note = Seed: VGAGDVGKS (KRAS G13D)
FGALDSGKY

SEQ ID NO: 82451 - protein, 9 aa, synthetic construct
  source 1..9: note = Seed: VGAGDVGKS (KRAS G13D)
FGALDTGKA

SEQ ID NO: 82452 - protein, 9 aa, synthetic construct
  source 1..9: note = Seed: VGAGDVGKS (KRAS G13D)
FGALDTGKC

SEQ ID NO: 82453 - protein, 9 aa, synthetic construct
  source 1..9: note = Seed: VGAGDVGKS (KRAS G13D)
FGALDTGKF

SEQ ID NO: 82454 - protein, 9 aa, synthetic construct
  source 1..9: note = Seed: VGAGDVGKS (KRAS G13D)
FGALDTGKG

SEQ ID NO: 82455 - protein, 9 aa, synthetic construct
  source 1..9: note = Seed: VGAGDVGKS (KRAS G13D)
FGALDTGKH

SEQ ID NO: 82456 - protein, 9 aa, synthetic construct
  source 1..9: note = Seed: VGAGDVGKS (KRAS G13D)
FGALDTGKI

SEQ ID NO: 82457 - protein, 9 aa, synthetic construct
  source 1..9: note = Seed: VGAGDVGKS (KRAS G13D)
FGALDTGKL

SEQ ID NO: 82458 - protein, 9 aa, synthetic construct
  source 1..9: note = Seed: VGAGDVGKS (KRAS G13D)
FGALDTGKM

SEQ ID NO: 82459 - protein, 9 aa, synthetic construct
  source 1..9: note = Seed: VGAGDVGKS (KRAS G13D)
FGALDTGKN

SEQ ID NO: 82460 - protein, 9 aa, synthetic construct
  source 1..9: note = Seed: VGAGDVGKS (KRAS G13D)
FGALDTGKS

SEQ ID NO: 82461 - protein, 9 aa, synthetic construct
  source 1..9: note = Seed: VGAGDVGKS (KRAS G13D)
FGALDTGKT

SEQ ID NO: 82462 - protein, 9 aa, synthetic construct
  source 1..9: note = Seed: VGAGDVGKS (KRAS G13D)
FGALDTGKV

SEQ ID NO: 82463 - protein, 9 aa, synthetic construct
  source 1..9: note = Seed: VGAGDVGKS (KRAS G13D)
FGALDVGKA

SEQ ID NO: 82464 - protein, 9 aa, synthetic construct
  source 1..9: note = Seed: VGAGDVGKS (KRAS G13D)
FGALDVGKG

SEQ ID NO: 82465 - protein, 9 aa, synthetic construct
  source 1..9: note = Seed: VGAGDVGKS (KRAS G13D)
FGALDVGKI

SEQ ID NO: 82466 - protein, 9 aa, synthetic construct
  source 1..9: note = Seed: VGAGDVGKS (KRAS G13D)
FGALDVGKL

SEQ ID NO: 82467 - protein, 9 aa, synthetic construct
  source 1..9: note = Seed: VGAGDVGKS (KRAS G13D)
FGALDVGKM

SEQ ID NO: 82468 - protein, 9 aa, synthetic construct
  source 1..9: note = Seed: VGAGDVGKS (KRAS G13D)
FGALDVGKN

SEQ ID NO: 82469 - protein, 9 aa, synthetic construct
  source 1..9: note = Seed: VGAGDVGKS (KRAS G13D)
FGALDVGKS

SEQ ID NO: 82470 - protein, 9 aa, synthetic construct
  source 1..9: note = Seed: VGAGDVGKS (KRAS G13D)
FGALDVGKT

SEQ ID NO: 82471 - protein, 9 aa, synthetic construct
  source 1..9: note = Seed: VGAGDVGKS (KRAS G13D)
FGALDVGKV

SEQ ID NO: 82472 - protein, 9 aa, synthetic construct
  source 1..9: note = Seed: VGAGDVGKS (KRAS G13D)
FGAMDAGKA

SEQ ID NO: 82473 - protein, 9 aa, synthetic construct
  source 1..9: note = Seed: VGAGDVGKS (KRAS G13D)
FGAMDAGKC

SEQ ID NO: 82474 - protein, 9 aa, synthetic construct
  source 1..9: note = Seed: VGAGDVGKS (KRAS G13D)
FGAMDAGKF

SEQ ID NO: 82475 - protein, 9 aa, synthetic construct
  source 1..9: note = Seed: VGAGDVGKS (KRAS G13D)
FGAMDAGKG

SEQ ID NO: 82476 - protein, 9 aa, synthetic construct
  source 1..9: note = Seed: VGAGDVGKS (KRAS G13D)
FGAMDAGKH

SEQ ID NO: 82477 - protein, 9 aa, synthetic construct
  source 1..9: note = Seed: VGAGDVGKS (KRAS G13D)
FGAMDAGKI

SEQ ID NO: 82478 - protein, 9 aa, synthetic construct
  source 1..9: note = Seed: VGAGDVGKS (KRAS G13D)
FGAMDAGKK

SEQ ID NO: 82479 - protein, 9 aa, synthetic construct
  source 1..9: note = Seed: VGAGDVGKS (KRAS G13D)
FGAMDAGKL

SEQ ID NO: 82480 - protein, 9 aa, synthetic construct
  source 1..9: note = Seed: VGAGDVGKS (KRAS G13D)
FGAMDAGKM

SEQ ID NO: 82481 - protein, 9 aa, synthetic construct
  source 1..9: note = Seed: VGAGDVGKS (KRAS G13D)
FGAMDAGKN

SEQ ID NO: 82482 - protein, 9 aa, synthetic construct
  source 1..9: note = Seed: VGAGDVGKS (KRAS G13D)
FGAMDAGKP

SEQ ID NO: 82483 - protein, 9 aa, synthetic construct
  source 1..9: note = Seed: VGAGDVGKS (KRAS G13D)
FGAMDAGKQ

SEQ ID NO: 82484 - protein, 9 aa, synthetic construct
  source 1..9: note = Seed: VGAGDVGKS (KRAS G13D)
FGAMDAGKR

SEQ ID NO: 82485 - protein, 9 aa, synthetic construct
  source 1..9: note = Seed: VGAGDVGKS (KRAS G13D)
FGAMDAGKS

SEQ ID NO: 82486 - protein, 9 aa, synthetic construct
  source 1..9: note = Seed: VGAGDVGKS (KRAS G13D)
FGAMDAGKT

SEQ ID NO: 82487 - protein, 9 aa, synthetic construct
  source 1..9: note = Seed: VGAGDVGKS (KRAS G13D)
FGAMDAGKV

SEQ ID NO: 82488 - protein, 9 aa, synthetic construct
  source 1..9: note = Seed: VGAGDVGKS (KRAS G13D)
FGAMDAGKW

SEQ ID NO: 82489 - protein, 9 aa, synthetic construct
  source 1..9: note = Seed: VGAGDVGKS (KRAS G13D)
FGAMDAGKY

SEQ ID NO: 82490 - protein, 9 aa, synthetic construct
  source 1..9: note = Seed: VGAGDVGKS (KRAS G13D)
FGAMDGGKA

SEQ ID NO: 82491 - protein, 9 aa, synthetic construct
  source 1..9: note = Seed: VGAGDVGKS (KRAS G13D)
FGAMDGGKC

SEQ ID NO: 82492 - protein, 9 aa, synthetic construct
  source 1..9: note = Seed: VGAGDVGKS (KRAS G13D)
FGAMDGGKF

SEQ ID NO: 82493 - protein, 9 aa, synthetic construct
  source 1..9: note = Seed: VGAGDVGKS (KRAS G13D)
FGAMDGGKG

SEQ ID NO: 82494 - protein, 9 aa, synthetic construct
  source 1..9: note = Seed: VGAGDVGKS (KRAS G13D)
FGAMDGGKH

SEQ ID NO: 82495 - protein, 9 aa, synthetic construct
  source 1..9: note = Seed: VGAGDVGKS (KRAS G13D)
FGAMDGGKI

SEQ ID NO: 82496 - protein, 9 aa, synthetic construct
  source 1..9: note = Seed: VGAGDVGKS (KRAS G13D)
FGAMDGGKL

SEQ ID NO: 82497 - protein, 9 aa, synthetic construct
  source 1..9: note = Seed: VGAGDVGKS (KRAS G13D)
FGAMDGGKM

SEQ ID NO: 82498 - protein, 9 aa, synthetic construct
  source 1..9: note = Seed: VGAGDVGKS (KRAS G13D)
FGAMDGGKN

SEQ ID NO: 82499 - protein, 9 aa, synthetic construct
  source 1..9: note = Seed: VGAGDVGKS (KRAS G13D)
FGAMDGGKP

SEQ ID NO: 82500 - protein, 9 aa, synthetic construct
  source 1..9: note = Seed: VGAGDVGKS (KRAS G13D)
FGAMDGGKQ

SEQ ID NO: 82501 - protein, 9 aa, synthetic construct
  source 1..9: note = Seed: VGAGDVGKS (KRAS G13D)
FGAMDGGKS

SEQ ID NO: 82502 - protein, 9 aa, synthetic construct
  source 1..9: note = Seed: VGAGDVGKS (KRAS G13D)
FGAMDGGKT

SEQ ID NO: 82503 - protein, 9 aa, synthetic construct
  source 1..9: note = Seed: VGAGDVGKS (KRAS G13D)
FGAMDGGKV

SEQ ID NO: 82504 - protein, 9 aa, synthetic construct
  source 1..9: note = Seed: VGAGDVGKS (KRAS G13D)
FGAMDGGKY

SEQ ID NO: 82505 - protein, 9 aa, synthetic construct
  source 1..9: note = Seed: VGAGDVGKS (KRAS G13D)
FGAMDHGKA

SEQ ID NO: 82506 - protein, 9 aa, synthetic construct
  source 1..9: note = Seed: VGAGDVGKS (KRAS G13D)
FGAMDHGKI

SEQ ID NO: 82507 - protein, 9 aa, synthetic construct
  source 1..9: note = Seed: VGAGDVGKS (KRAS G13D)
FGAMDHGKL

SEQ ID NO: 82508 - protein, 9 aa, synthetic construct
  source 1..9: note = Seed: VGAGDVGKS (KRAS G13D)
FGAMDHGKM

SEQ ID NO: 82509 - protein, 9 aa, synthetic construct
  source 1..9: note = Seed: VGAGDVGKS (KRAS G13D)
FGAMDHGKV

SEQ ID NO: 82510 - protein, 9 aa, synthetic construct
  source 1..9: note = Seed: VGAGDVGKS (KRAS G13D)
FGAMDIGKA

SEQ ID NO: 82511 - protein, 9 aa, synthetic construct
  source 1..9: note = Seed: VGAGDVGKS (KRAS G13D)
FGAMDIGKI

SEQ ID NO: 82512 - protein, 9 aa, synthetic construct
  source 1..9: note = Seed: VGAGDVGKS (KRAS G13D)
FGAMDIGKL

SEQ ID NO: 82513 - protein, 9 aa, synthetic construct
  source 1..9: note = Seed: VGAGDVGKS (KRAS G13D)
FGAMDIGKM

SEQ ID NO: 82514 - protein, 9 aa, synthetic construct
  source 1..9: note = Seed: VGAGDVGKS (KRAS G13D)
FGAMDIGKS

SEQ ID NO: 82515 - protein, 9 aa, synthetic construct
  source 1..9: note = Seed: VGAGDVGKS (KRAS G13D)
FGAMDIGKT

SEQ ID NO: 82516 - protein, 9 aa, synthetic construct
  source 1..9: note = Seed: VGAGDVGKS (KRAS G13D)
FGAMDIGKV

SEQ ID NO: 82517 - protein, 9 aa, synthetic construct
  source 1..9: note = Seed: VGAGDVGKS (KRAS G13D)
FGAMDLGKA

SEQ ID NO: 82518 - protein, 9 aa, synthetic construct
  source 1..9: note = Seed: VGAGDVGKS (KRAS G13D)
FGAMDLGKI

SEQ ID NO: 82519 - protein, 9 aa, synthetic construct
  source 1..9: note = Seed: VGAGDVGKS (KRAS G13D)
FGAMDLGKL

SEQ ID NO: 82520 - protein, 9 aa, synthetic construct
  source 1..9: note = Seed: VGAGDVGKS (KRAS G13D)
FGAMDLGKV

SEQ ID NO: 82521 - protein, 9 aa, synthetic construct
  source 1..9: note = Seed: VGAGDVGKS (KRAS G13D)
FGAMDMGKA

SEQ ID NO: 82522 - protein, 9 aa, synthetic construct
  source 1..9: note = Seed: VGAGDVGKS (KRAS G13D)
FGAMDMGKI

SEQ ID NO: 82523 - protein, 9 aa, synthetic construct
  source 1..9: note = Seed: VGAGDVGKS (KRAS G13D)
FGAMDMGKL

SEQ ID NO: 82524 - protein, 9 aa, synthetic construct
  source 1..9: note = Seed: VGAGDVGKS (KRAS G13D)
FGAMDMGKV

SEQ ID NO: 82525 - protein, 9 aa, synthetic construct
  source 1..9: note = Seed: VGAGDVGKS (KRAS G13D)
FGAMDNGKA

SEQ ID NO: 82526 - protein, 9 aa, synthetic construct
  source 1..9: note = Seed: VGAGDVGKS (KRAS G13D)
FGAMDNGKG

SEQ ID NO: 82527 - protein, 9 aa, synthetic construct
  source 1..9: note = Seed: VGAGDVGKS (KRAS G13D)
FGAMDNGKI

SEQ ID NO: 82528 - protein, 9 aa, synthetic construct
  source 1..9: note = Seed: VGAGDVGKS (KRAS G13D)
FGAMDNGKL

SEQ ID NO: 82529 - protein, 9 aa, synthetic construct
  source 1..9: note = Seed: VGAGDVGKS (KRAS G13D)
FGAMDNGKM

SEQ ID NO: 82530 - protein, 9 aa, synthetic construct
  source 1..9: note = Seed: VGAGDVGKS (KRAS G13D)
FGAMDNGKN

SEQ ID NO: 82531 - protein, 9 aa, synthetic construct
  source 1..9: note = Seed: VGAGDVGKS (KRAS G13D)
FGAMDNGKS

SEQ ID NO: 82532 - protein, 9 aa, synthetic construct
  source 1..9: note = Seed: VGAGDVGKS (KRAS G13D)
FGAMDNGKT

SEQ ID NO: 82533 - protein, 9 aa, synthetic construct
  source 1..9: note = Seed: VGAGDVGKS (KRAS G13D)
FGAMDNGKV

SEQ ID NO: 82534 - protein, 9 aa, synthetic construct
  source 1..9: note = Seed: VGAGDVGKS (KRAS G13D)
FGAMDPGKA

SEQ ID NO: 82535 - protein, 9 aa, synthetic construct
  source 1..9: note = Seed: VGAGDVGKS (KRAS G13D)
FGAMDPGKC

SEQ ID NO: 82536 - protein, 9 aa, synthetic construct
  source 1..9: note = Seed: VGAGDVGKS (KRAS G13D)
FGAMDPGKF

SEQ ID NO: 82537 - protein, 9 aa, synthetic construct
  source 1..9: note = Seed: VGAGDVGKS (KRAS G13D)
FGAMDPGKG

SEQ ID NO: 82538 - protein, 9 aa, synthetic construct
  source 1..9: note = Seed: VGAGDVGKS (KRAS G13D)
FGAMDPGKI

SEQ ID NO: 82539 - protein, 9 aa, synthetic construct
  source 1..9: note = Seed: VGAGDVGKS (KRAS G13D)
FGAMDPGKL

SEQ ID NO: 82540 - protein, 9 aa, synthetic construct
  source 1..9: note = Seed: VGAGDVGKS (KRAS G13D)
FGAMDPGKM

SEQ ID NO: 82541 - protein, 9 aa, synthetic construct
  source 1..9: note = Seed: VGAGDVGKS (KRAS G13D)
FGAMDPGKN

SEQ ID NO: 82542 - protein, 9 aa, synthetic construct
  source 1..9: note = Seed: VGAGDVGKS (KRAS G13D)
FGAMDPGKQ

SEQ ID NO: 82543 - protein, 9 aa, synthetic construct
  source 1..9: note = Seed: VGAGDVGKS (KRAS G13D)
FGAMDPGKS

SEQ ID NO: 82544 - protein, 9 aa, synthetic construct
  source 1..9: note = Seed: VGAGDVGKS (KRAS G13D)
FGAMDPGKT

SEQ ID NO: 82545 - protein, 9 aa, synthetic construct
  source 1..9: note = Seed: VGAGDVGKS (KRAS G13D)
FGAMDPGKV

SEQ ID NO: 82546 - protein, 9 aa, synthetic construct
  source 1..9: note = Seed: VGAGDVGKS (KRAS G13D)
FGAMDQGKL

SEQ ID NO: 82547 - protein, 9 aa, synthetic construct
  source 1..9: note = Seed: VGAGDVGKS (KRAS G13D)
FGAMDQGKV

SEQ ID NO: 82548 - protein, 9 aa, synthetic construct
  source 1..9: note = Seed: VGAGDVGKS (KRAS G13D)
FGAMDSGKA

SEQ ID NO: 82549 - protein, 9 aa, synthetic construct
  source 1..9: note = Seed: VGAGDVGKS (KRAS G13D)
FGAMDSGKC

SEQ ID NO: 82550 - protein, 9 aa, synthetic construct
  source 1..9: note = Seed: VGAGDVGKS (KRAS G13D)
FGAMDSGKF

SEQ ID NO: 82551 - protein, 9 aa, synthetic construct
  source 1..9: note = Seed: VGAGDVGKS (KRAS G13D)
FGAMDSGKG

SEQ ID NO: 82552 - protein, 9 aa, synthetic construct
  source 1..9: note = Seed: VGAGDVGKS (KRAS G13D)
FGAMDSGKH

SEQ ID NO: 82553 - protein, 9 aa, synthetic construct
  source 1..9: note = Seed: VGAGDVGKS (KRAS G13D)
FGAMDSGKI

SEQ ID NO: 82554 - protein, 9 aa, synthetic construct
  source 1..9: note = Seed: VGAGDVGKS (KRAS G13D)
FGAMDSGKL

SEQ ID NO: 82555 - protein, 9 aa, synthetic construct
  source 1..9: note = Seed: VGAGDVGKS (KRAS G13D)
FGAMDSGKM

SEQ ID NO: 82556 - protein, 9 aa, synthetic construct
  source 1..9: note = Seed: VGAGDVGKS (KRAS G13D)
FGAMDSGKN

SEQ ID NO: 82557 - protein, 9 aa, synthetic construct
  source 1..9: note = Seed: VGAGDVGKS (KRAS G13D)
FGAMDSGKP

SEQ ID NO: 82558 - protein, 9 aa, synthetic construct
  source 1..9: note = Seed: VGAGDVGKS (KRAS G13D)
FGAMDSGKQ

SEQ ID NO: 82559 - protein, 9 aa, synthetic construct
  source 1..9: note = Seed: VGAGDVGKS (KRAS G13D)
FGAMDSGKS

SEQ ID NO: 82560 - protein, 9 aa, synthetic construct
  source 1..9: note = Seed: VGAGDVGKS (KRAS G13D)
FGAMDSGKT

SEQ ID NO: 82561 - protein, 9 aa, synthetic construct
  source 1..9: note = Seed: VGAGDVGKS (KRAS G13D)
FGAMDSGKV

SEQ ID NO: 82562 - protein, 9 aa, synthetic construct
  source 1..9: note = Seed: VGAGDVGKS (KRAS G13D)
FGAMDSGKY

SEQ ID NO: 82563 - protein, 9 aa, synthetic construct
  source 1..9: note = Seed: VGAGDVGKS (KRAS G13D)
FGAMDTGKA

SEQ ID NO: 82564 - protein, 9 aa, synthetic construct
  source 1..9: note = Seed: VGAGDVGKS (KRAS G13D)
FGAMDTGKG

SEQ ID NO: 82565 - protein, 9 aa, synthetic construct
  source 1..9: note = Seed: VGAGDVGKS (KRAS G13D)
FGAMDTGKI

SEQ ID NO: 82566 - protein, 9 aa, synthetic construct
  source 1..9: note = Seed: VGAGDVGKS (KRAS G13D)
FGAMDTGKL

SEQ ID NO: 82567 - protein, 9 aa, synthetic construct
  source 1..9: note = Seed: VGAGDVGKS (KRAS G13D)
FGAMDTGKM

SEQ ID NO: 82568 - protein, 9 aa, synthetic construct
  source 1..9: note = Seed: VGAGDVGKS (KRAS G13D)
FGAMDTGKN

SEQ ID NO: 82569 - protein, 9 aa, synthetic construct
  source 1..9: note = Seed: VGAGDVGKS (KRAS G13D)
FGAMDTGKS

SEQ ID NO: 82570 - protein, 9 aa, synthetic construct
  source 1..9: note = Seed: VGAGDVGKS (KRAS G13D)
FGAMDTGKT

SEQ ID NO: 82571 - protein, 9 aa, synthetic construct
  source 1..9: note = Seed: VGAGDVGKS (KRAS G13D)
FGAMDTGKV

SEQ ID NO: 82572 - protein, 9 aa, synthetic construct
  source 1..9: note = Seed: VGAGDVGKS (KRAS G13D)
FGAMDVGKA

SEQ ID NO: 82573 - protein, 9 aa, synthetic construct
  source 1..9: note = Seed: VGAGDVGKS (KRAS G13D)
FGAMDVGKG

SEQ ID NO: 82574 - protein, 9 aa, synthetic construct
  source 1..9: note = Seed: VGAGDVGKS (KRAS G13D)
FGAMDVGKI

SEQ ID NO: 82575 - protein, 9 aa, synthetic construct
  source 1..9: note = Seed: VGAGDVGKS (KRAS G13D)
FGAMDVGKL

SEQ ID NO: 82576 - protein, 9 aa, synthetic construct
  source 1..9: note = Seed: VGAGDVGKS (KRAS G13D)
FGAMDVGKM

SEQ ID NO: 82577 - protein, 9 aa, synthetic construct
  source 1..9: note = Seed: VGAGDVGKS (KRAS G13D)
FGAMDVGKN

SEQ ID NO: 82578 - protein, 9 aa, synthetic construct
  source 1..9: note = Seed: VGAGDVGKS (KRAS G13D)
FGAMDVGKS

SEQ ID NO: 82579 - protein, 9 aa, synthetic construct
  source 1..9: note = Seed: VGAGDVGKS (KRAS G13D)
FGAMDVGKT

SEQ ID NO: 82580 - protein, 9 aa, synthetic construct
  source 1..9: note = Seed: VGAGDVGKS (KRAS G13D)
FGAMDVGKV

SEQ ID NO: 82581 - protein, 9 aa, synthetic construct
  source 1..9: note = Seed: VGAGDVGKS (KRAS G13D)
FGANDAGKA

SEQ ID NO: 82582 - protein, 9 aa, synthetic construct
  source 1..9: note = Seed: VGAGDVGKS (KRAS G13D)
FGANDAGKI

SEQ ID NO: 82583 - protein, 9 aa, synthetic construct
  source 1..9: note = Seed: VGAGDVGKS (KRAS G13D)
FGANDAGKL

SEQ ID NO: 82584 - protein, 9 aa, synthetic construct
  source 1..9: note = Seed: VGAGDVGKS (KRAS G13D)
FGANDAGKM

SEQ ID NO: 82585 - protein, 9 aa, synthetic construct
  source 1..9: note = Seed: VGAGDVGKS (KRAS G13D)
FGANDAGKV

SEQ ID NO: 82586 - protein, 9 aa, synthetic construct
  source 1..9: note = Seed: VGAGDVGKS (KRAS G13D)
FGAQDAGKA

SEQ ID NO: 82587 - protein, 9 aa, synthetic construct
  source 1..9: note = Seed: VGAGDVGKS (KRAS G13D)
FGAQDAGKF

SEQ ID NO: 82588 - protein, 9 aa, synthetic construct
  source 1..9: note = Seed: VGAGDVGKS (KRAS G13D)
FGAQDAGKG

SEQ ID NO: 82589 - protein, 9 aa, synthetic construct
  source 1..9: note = Seed: VGAGDVGKS (KRAS G13D)
FGAQDAGKI

SEQ ID NO: 82590 - protein, 9 aa, synthetic construct
  source 1..9: note = Seed: VGAGDVGKS (KRAS G13D)
FGAQDAGKL

SEQ ID NO: 82591 - protein, 9 aa, synthetic construct
  source 1..9: note = Seed: VGAGDVGKS (KRAS G13D)
FGAQDAGKM

SEQ ID NO: 82592 - protein, 9 aa, synthetic construct
  source 1..9: note = Seed: VGAGDVGKS (KRAS G13D)
FGAQDAGKS

SEQ ID NO: 82593 - protein, 9 aa, synthetic construct
  source 1..9: note = Seed: VGAGDVGKS (KRAS G13D)
FGAQDAGKT

SEQ ID NO: 82594 - protein, 9 aa, synthetic construct
  source 1..9: note = Seed: VGAGDVGKS (KRAS G13D)
FGAQDAGKV

SEQ ID NO: 82595 - protein, 9 aa, synthetic construct
  source 1..9: note = Seed: VGAGDVGKS (KRAS G13D)
FGAQDGGKA

SEQ ID NO: 82596 - protein, 9 aa, synthetic construct
  source 1..9: note = Seed: VGAGDVGKS (KRAS G13D)
FGAQDGGKI

SEQ ID NO: 82597 - protein, 9 aa, synthetic construct
  source 1..9: note = Seed: VGAGDVGKS (KRAS G13D)
FGAQDGGKL

SEQ ID NO: 82598 - protein, 9 aa, synthetic construct
  source 1..9: note = Seed: VGAGDVGKS (KRAS G13D)
FGAQDGGKM

SEQ ID NO: 82599 - protein, 9 aa, synthetic construct
  source 1..9: note = Seed: VGAGDVGKS (KRAS G13D)
FGAQDGGKT

SEQ ID NO: 82600 - protein, 9 aa, synthetic construct
  source 1..9: note = Seed: VGAGDVGKS (KRAS G13D)
FGAQDGGKV

SEQ ID NO: 82601 - protein, 9 aa, synthetic construct
  source 1..9: note = Seed: VGAGDVGKS (KRAS G13D)
FGAQDNGKA

SEQ ID NO: 82602 - protein, 9 aa, synthetic construct
  source 1..9: note = Seed: VGAGDVGKS (KRAS G13D)
FGAQDNGKI

SEQ ID NO: 82603 - protein, 9 aa, synthetic construct
  source 1..9: note = Seed: VGAGDVGKS (KRAS G13D)
FGAQDNGKL

SEQ ID NO: 82604 - protein, 9 aa, synthetic construct
  source 1..9: note = Seed: VGAGDVGKS (KRAS G13D)
FGAQDNGKV

SEQ ID NO: 82605 - protein, 9 aa, synthetic construct
  source 1..9: note = Seed: VGAGDVGKS (KRAS G13D)
FGAQDPGKA

SEQ ID NO: 82606 - protein, 9 aa, synthetic construct
  source 1..9: note = Seed: VGAGDVGKS (KRAS G13D)
FGAQDPGKI

SEQ ID NO: 82607 - protein, 9 aa, synthetic construct
  source 1..9: note = Seed: VGAGDVGKS (KRAS G13D)
FGAQDPGKL

SEQ ID NO: 82608 - protein, 9 aa, synthetic construct
  source 1..9: note = Seed: VGAGDVGKS (KRAS G13D)
FGAQDPGKM

SEQ ID NO: 82609 - protein, 9 aa, synthetic construct
  source 1..9: note = Seed: VGAGDVGKS (KRAS G13D)
FGAQDPGKV

SEQ ID NO: 82610 - protein, 9 aa, synthetic construct
  source 1..9: note = Seed: VGAGDVGKS (KRAS G13D)
FGAQDSGKA

SEQ ID NO: 82611 - protein, 9 aa, synthetic construct
  source 1..9: note = Seed: VGAGDVGKS (KRAS G13D)
FGAQDSGKI

SEQ ID NO: 82612 - protein, 9 aa, synthetic construct
  source 1..9: note = Seed: VGAGDVGKS (KRAS G13D)
FGAQDSGKL

SEQ ID NO: 82613 - protein, 9 aa, synthetic construct
  source 1..9: note = Seed: VGAGDVGKS (KRAS G13D)
FGAQDSGKM

SEQ ID NO: 82614 - protein, 9 aa, synthetic construct
  source 1..9: note = Seed: VGAGDVGKS (KRAS G13D)
FGAQDSGKS

SEQ ID NO: 82615 - protein, 9 aa, synthetic construct
  source 1..9: note = Seed: VGAGDVGKS (KRAS G13D)
FGAQDSGKT

SEQ ID NO: 82616 - protein, 9 aa, synthetic construct
  source 1..9: note = Seed: VGAGDVGKS (KRAS G13D)
FGAQDSGKV

SEQ ID NO: 82617 - protein, 9 aa, synthetic construct
  source 1..9: note = Seed: VGAGDVGKS (KRAS G13D)
FGAQDTGKA

SEQ ID NO: 82618 - protein, 9 aa, synthetic construct
  source 1..9: note = Seed: VGAGDVGKS (KRAS G13D)
FGAQDTGKI

SEQ ID NO: 82619 - protein, 9 aa, synthetic construct
  source 1..9: note = Seed: VGAGDVGKS (KRAS G13D)
FGAQDTGKL

SEQ ID NO: 82620 - protein, 9 aa, synthetic construct
  source 1..9: note = Seed: VGAGDVGKS (KRAS G13D)
FGAQDTGKV

SEQ ID NO: 82621 - protein, 9 aa, synthetic construct
  source 1..9: note = Seed: VGAGDVGKS (KRAS G13D)
FGAQDVGKA

SEQ ID NO: 82622 - protein, 9 aa, synthetic construct
  source 1..9: note = Seed: VGAGDVGKS (KRAS G13D)
FGAQDVGKI

SEQ ID NO: 82623 - protein, 9 aa, synthetic construct
  source 1..9: note = Seed: VGAGDVGKS (KRAS G13D)
FGAQDVGKL

SEQ ID NO: 82624 - protein, 9 aa, synthetic construct
  source 1..9: note = Seed: VGAGDVGKS (KRAS G13D)
FGAQDVGKV

SEQ ID NO: 82625 - protein, 9 aa, synthetic construct
  source 1..9: note = Seed: VGAGDVGKS (KRAS G13D)
FGASDAGKA

SEQ ID NO: 82626 - protein, 9 aa, synthetic construct
  source 1..9: note = Seed: VGAGDVGKS (KRAS G13D)
FGASDAGKI

SEQ ID NO: 82627 - protein, 9 aa, synthetic construct
  source 1..9: note = Seed: VGAGDVGKS (KRAS G13D)
FGASDAGKL

SEQ ID NO: 82628 - protein, 9 aa, synthetic construct
  source 1..9: note = Seed: VGAGDVGKS (KRAS G13D)
FGASDAGKM

SEQ ID NO: 82629 - protein, 9 aa, synthetic construct
  source 1..9: note = Seed: VGAGDVGKS (KRAS G13D)
FGASDAGKS

SEQ ID NO: 82630 - protein, 9 aa, synthetic construct
  source 1..9: note = Seed: VGAGDVGKS (KRAS G13D)
FGASDAGKT

SEQ ID NO: 82631 - protein, 9 aa, synthetic construct
  source 1..9: note = Seed: VGAGDVGKS (KRAS G13D)
FGASDAGKV

SEQ ID NO: 82632 - protein, 9 aa, synthetic construct
  source 1..9: note = Seed: VGAGDVGKS (KRAS G13D)
FGASDGGKI

SEQ ID NO: 82633 - protein, 9 aa, synthetic construct
  source 1..9: note = Seed: VGAGDVGKS (KRAS G13D)
FGASDGGKL

SEQ ID NO: 82634 - protein, 9 aa, synthetic construct
  source 1..9: note = Seed: VGAGDVGKS (KRAS G13D)
FGASDGGKV

SEQ ID NO: 82635 - protein, 9 aa, synthetic construct
  source 1..9: note = Seed: VGAGDVGKS (KRAS G13D)
FGASDPGKA

SEQ ID NO: 82636 - protein, 9 aa, synthetic construct
  source 1..9: note = Seed: VGAGDVGKS (KRAS G13D)
FGASDPGKI

SEQ ID NO: 82637 - protein, 9 aa, synthetic construct
  source 1..9: note = Seed: VGAGDVGKS (KRAS G13D)
FGASDPGKL

SEQ ID NO: 82638 - protein, 9 aa, synthetic construct
  source 1..9: note = Seed: VGAGDVGKS (KRAS G13D)
FGASDPGKV

SEQ ID NO: 82639 - protein, 9 aa, synthetic construct
  source 1..9: note = Seed: VGAGDVGKS (KRAS G13D)
FGASDSGKA

SEQ ID NO: 82640 - protein, 9 aa, synthetic construct
  source 1..9: note = Seed: VGAGDVGKS (KRAS G13D)
FGASDSGKI

SEQ ID NO: 82641 - protein, 9 aa, synthetic construct
  source 1..9: note = Seed: VGAGDVGKS (KRAS G13D)
FGASDSGKL

SEQ ID NO: 82642 - protein, 9 aa, synthetic construct
  source 1..9: note = Seed: VGAGDVGKS (KRAS G13D)
FGASDSGKV

SEQ ID NO: 82643 - protein, 9 aa, synthetic construct
  source 1..9: note = Seed: VGAGDVGKS (KRAS G13D)
FGASDVGKA

SEQ ID NO: 82644 - protein, 9 aa, synthetic construct
  source 1..9: note = Seed: VGAGDVGKS (KRAS G13D)
FGATDAGKA

SEQ ID NO: 82645 - protein, 9 aa, synthetic construct
  source 1..9: note = Seed: VGAGDVGKS (KRAS G13D)
FGATDAGKI

SEQ ID NO: 82646 - protein, 9 aa, synthetic construct
  source 1..9: note = Seed: VGAGDVGKS (KRAS G13D)
FGATDAGKL

SEQ ID NO: 82647 - protein, 9 aa, synthetic construct
  source 1..9: note = Seed: VGAGDVGKS (KRAS G13D)
FGATDAGKM

SEQ ID NO: 82648 - protein, 9 aa, synthetic construct
  source 1..9: note = Seed: VGAGDVGKS (KRAS G13D)
FGATDAGKS

SEQ ID NO: 82649 - protein, 9 aa, synthetic construct
  source 1..9: note = Seed: VGAGDVGKS (KRAS G13D)
FGATDAGKV

SEQ ID NO: 82650 - protein, 9 aa, synthetic construct
  source 1..9: note = Seed: VGAGDVGKS (KRAS G13D)
FGATDGGKI

SEQ ID NO: 82651 - protein, 9 aa, synthetic construct
  source 1..9: note = Seed: VGAGDVGKS (KRAS G13D)
FGATDGGKL

SEQ ID NO: 82652 - protein, 9 aa, synthetic construct
  source 1..9: note = Seed: VGAGDVGKS (KRAS G13D)
FGATDGGKV

SEQ ID NO: 82653 - protein, 9 aa, synthetic construct
  source 1..9: note = Seed: VGAGDVGKS (KRAS G13D)
FGATDSGKI

SEQ ID NO: 82654 - protein, 9 aa, synthetic construct
  source 1..9: note = Seed: VGAGDVGKS (KRAS G13D)
FGATDSGKL

SEQ ID NO: 82655 - protein, 9 aa, synthetic construct
  source 1..9: note = Seed: VGAGDVGKS (KRAS G13D)
FGATDSGKV

SEQ ID NO: 82656 - protein, 9 aa, synthetic construct
  source 1..9: note = Seed: VGAGDVGKS (KRAS G13D)
FGAVDAGKA

SEQ ID NO: 82657 - protein, 9 aa, synthetic construct
  source 1..9: note = Seed: VGAGDVGKS (KRAS G13D)
FGAVDAGKG

SEQ ID NO: 82658 - protein, 9 aa, synthetic construct
  source 1..9: note = Seed: VGAGDVGKS (KRAS G13D)
FGAVDAGKI

SEQ ID NO: 82659 - protein, 9 aa, synthetic construct
  source 1..9: note = Seed: VGAGDVGKS (KRAS G13D)
FGAVDAGKL

SEQ ID NO: 82660 - protein, 9 aa, synthetic construct
  source 1..9: note = Seed: VGAGDVGKS (KRAS G13D)
FGAVDAGKM

SEQ ID NO: 82661 - protein, 9 aa, synthetic construct
  source 1..9: note = Seed: VGAGDVGKS (KRAS G13D)
FGAVDAGKN

SEQ ID NO: 82662 - protein, 9 aa, synthetic construct
  source 1..9: note = Seed: VGAGDVGKS (KRAS G13D)
FGAVDAGKS

SEQ ID NO: 82663 - protein, 9 aa, synthetic construct
  source 1..9: note = Seed: VGAGDVGKS (KRAS G13D)
FGAVDAGKT

SEQ ID NO: 82664 - protein, 9 aa, synthetic construct
  source 1..9: note = Seed: VGAGDVGKS (KRAS G13D)
FGAVDAGKV

SEQ ID NO: 82665 - protein, 9 aa, synthetic construct
  source 1..9: note = Seed: VGAGDVGKS (KRAS G13D)
FGAVDGGKA

SEQ ID NO: 82666 - protein, 9 aa, synthetic construct
  source 1..9: note = Seed: VGAGDVGKS (KRAS G13D)
FGAVDGGKI

SEQ ID NO: 82667 - protein, 9 aa, synthetic construct
  source 1..9: note = Seed: VGAGDVGKS (KRAS G13D)
FGAVDGGKL

SEQ ID NO: 82668 - protein, 9 aa, synthetic construct
  source 1..9: note = Seed: VGAGDVGKS (KRAS G13D)
FGAVDGGKM

SEQ ID NO: 82669 - protein, 9 aa, synthetic construct
  source 1..9: note = Seed: VGAGDVGKS (KRAS G13D)
FGAVDGGKS

SEQ ID NO: 82670 - protein, 9 aa, synthetic construct
  source 1..9: note = Seed: VGAGDVGKS (KRAS G13D)
FGAVDGGKT

SEQ ID NO: 82671 - protein, 9 aa, synthetic construct
  source 1..9: note = Seed: VGAGDVGKS (KRAS G13D)
FGAVDGGKV

SEQ ID NO: 82672 - protein, 9 aa, synthetic construct
  source 1..9: note = Seed: VGAGDVGKS (KRAS G13D)
FGAVDNGKA

SEQ ID NO: 82673 - protein, 9 aa, synthetic construct
  source 1..9: note = Seed: VGAGDVGKS (KRAS G13D)
FGAVDNGKI

SEQ ID NO: 82674 - protein, 9 aa, synthetic construct
  source 1..9: note = Seed: VGAGDVGKS (KRAS G13D)
FGAVDNGKL

SEQ ID NO: 82675 - protein, 9 aa, synthetic construct
  source 1..9: note = Seed: VGAGDVGKS (KRAS G13D)
FGAVDNGKV

SEQ ID NO: 82676 - protein, 9 aa, synthetic construct
  source 1..9: note = Seed: VGAGDVGKS (KRAS G13D)
FGAVDPGKA

SEQ ID NO: 82677 - protein, 9 aa, synthetic construct
  source 1..9: note = Seed: VGAGDVGKS (KRAS G13D)
FGAVDPGKI

SEQ ID NO: 82678 - protein, 9 aa, synthetic construct
  source 1..9: note = Seed: VGAGDVGKS (KRAS G13D)
FGAVDPGKL

SEQ ID NO: 82679 - protein, 9 aa, synthetic construct
  source 1..9: note = Seed: VGAGDVGKS (KRAS G13D)
FGAVDPGKM

SEQ ID NO: 82680 - protein, 9 aa, synthetic construct
  source 1..9: note = Seed: VGAGDVGKS (KRAS G13D)
FGAVDPGKS

SEQ ID NO: 82681 - protein, 9 aa, synthetic construct
  source 1..9: note = Seed: VGAGDVGKS (KRAS G13D)
FGAVDPGKT

SEQ ID NO: 82682 - protein, 9 aa, synthetic construct
  source 1..9: note = Seed: VGAGDVGKS (KRAS G13D)
FGAVDPGKV

SEQ ID NO: 82683 - protein, 9 aa, synthetic construct
  source 1..9: note = Seed: VGAGDVGKS (KRAS G13D)
FGAVDSGKA

SEQ ID NO: 82684 - protein, 9 aa, synthetic construct
  source 1..9: note = Seed: VGAGDVGKS (KRAS G13D)
FGAVDSGKI

SEQ ID NO: 82685 - protein, 9 aa, synthetic construct
  source 1..9: note = Seed: VGAGDVGKS (KRAS G13D)
FGAVDSGKL

SEQ ID NO: 82686 - protein, 9 aa, synthetic construct
  source 1..9: note = Seed: VGAGDVGKS (KRAS G13D)
FGAVDSGKM

SEQ ID NO: 82687 - protein, 9 aa, synthetic construct
  source 1..9: note = Seed: VGAGDVGKS (KRAS G13D)
FGAVDSGKS

SEQ ID NO: 82688 - protein, 9 aa, synthetic construct
  source 1..9: note = Seed: VGAGDVGKS (KRAS G13D)
FGAVDSGKT

SEQ ID NO: 82689 - protein, 9 aa, synthetic construct
  source 1..9: note = Seed: VGAGDVGKS (KRAS G13D)
FGAVDSGKV

SEQ ID NO: 82690 - protein, 9 aa, synthetic construct
  source 1..9: note = Seed: VGAGDVGKS (KRAS G13D)
FGAVDTGKA

SEQ ID NO: 82691 - protein, 9 aa, synthetic construct
  source 1..9: note = Seed: VGAGDVGKS (KRAS G13D)
FGAVDTGKI

SEQ ID NO: 82692 - protein, 9 aa, synthetic construct
  source 1..9: note = Seed: VGAGDVGKS (KRAS G13D)
FGAVDTGKL

SEQ ID NO: 82693 - protein, 9 aa, synthetic construct
  source 1..9: note = Seed: VGAGDVGKS (KRAS G13D)
FGAVDTGKM

SEQ ID NO: 82694 - protein, 9 aa, synthetic construct
  source 1..9: note = Seed: VGAGDVGKS (KRAS G13D)
FGAVDTGKV

SEQ ID NO: 82695 - protein, 9 aa, synthetic construct
  source 1..9: note = Seed: VGAGDVGKS (KRAS G13D)
FGAVDVGKA

SEQ ID NO: 82696 - protein, 9 aa, synthetic construct
  source 1..9: note = Seed: VGAGDVGKS (KRAS G13D)
FGAVDVGKI

SEQ ID NO: 82697 - protein, 9 aa, synthetic construct
  source 1..9: note = Seed: VGAGDVGKS (KRAS G13D)
FGAVDVGKL

SEQ ID NO: 82698 - protein, 9 aa, synthetic construct
  source 1..9: note = Seed: VGAGDVGKS (KRAS G13D)
FGAVDVGKV

SEQ ID NO: 82699 - protein, 9 aa, synthetic construct
  source 1..9: note = Seed: VGAGDVGKS (KRAS G13D)
FGAYDAGKA

SEQ ID NO: 82700 - protein, 9 aa, synthetic construct
  source 1..9: note = Seed: VGAGDVGKS (KRAS G13D)
HGAADAGKS

SEQ ID NO: 82701 - protein, 9 aa, synthetic construct
  source 1..9: note = Seed: VGAGDVGKS (KRAS G13D)
HGAADAGKT

SEQ ID NO: 82702 - protein, 9 aa, synthetic construct
  source 1..9: note = Seed: VGAGDVGKS (KRAS G13D)
HGAADPGKA

SEQ ID NO: 82703 - protein, 9 aa, synthetic construct
  source 1..9: note = Seed: VGAGDVGKS (KRAS G13D)
HGAADVGKA

SEQ ID NO: 82704 - protein, 9 aa, synthetic construct
  source 1..9: note = Seed: VGAGDVGKS (KRAS G13D)
HGAADVGKV

SEQ ID NO: 82705 - protein, 9 aa, synthetic construct
  source 1..9: note = Seed: VGAGDVGKS (KRAS G13D)
IGAADAGKA

SEQ ID NO: 82706 - protein, 9 aa, synthetic construct
  source 1..9: note = Seed: VGAGDVGKS (KRAS G13D)
IGAADAGKC

SEQ ID NO: 82707 - protein, 9 aa, synthetic construct
  source 1..9: note = Seed: VGAGDVGKS (KRAS G13D)
IGAADAGKF

SEQ ID NO: 82708 - protein, 9 aa, synthetic construct
  source 1..9: note = Seed: VGAGDVGKS (KRAS G13D)
IGAADAGKG

SEQ ID NO: 82709 - protein, 9 aa, synthetic construct
  source 1..9: note = Seed: VGAGDVGKS (KRAS G13D)
IGAADAGKI

SEQ ID NO: 82710 - protein, 9 aa, synthetic construct
  source 1..9: note = Seed: VGAGDVGKS (KRAS G13D)
IGAADAGKL

SEQ ID NO: 82711 - protein, 9 aa, synthetic construct
  source 1..9: note = Seed: VGAGDVGKS (KRAS G13D)
IGAADAGKM

SEQ ID NO: 82712 - protein, 9 aa, synthetic construct
  source 1..9: note = Seed: VGAGDVGKS (KRAS G13D)
IGAADAGKN

SEQ ID NO: 82713 - protein, 9 aa, synthetic construct
  source 1..9: note = Seed: VGAGDVGKS (KRAS G13D)
IGAADAGKS

SEQ ID NO: 82714 - protein, 9 aa, synthetic construct
  source 1..9: note = Seed: VGAGDVGKS (KRAS G13D)
IGAADAGKT

SEQ ID NO: 82715 - protein, 9 aa, synthetic construct
  source 1..9: note = Seed: VGAGDVGKS (KRAS G13D)
IGAADAGKV

SEQ ID NO: 82716 - protein, 9 aa, synthetic construct
  source 1..9: note = Seed: VGAGDVGKS (KRAS G13D)
IGAADGGKI

SEQ ID NO: 82717 - protein, 9 aa, synthetic construct
  source 1..9: note = Seed: VGAGDVGKS (KRAS G13D)
IGAADGGKL

SEQ ID NO: 82718 - protein, 9 aa, synthetic construct
  source 1..9: note = Seed: VGAGDVGKS (KRAS G13D)
IGAADGGKV

SEQ ID NO: 82719 - protein, 9 aa, synthetic construct
  source 1..9: note = Seed: VGAGDVGKS (KRAS G13D)
IGAADIGKA

SEQ ID NO: 82720 - protein, 9 aa, synthetic construct
  source 1..9: note = Seed: VGAGDVGKS (KRAS G13D)
IGAADIGKI

SEQ ID NO: 82721 - protein, 9 aa, synthetic construct
  source 1..9: note = Seed: VGAGDVGKS (KRAS G13D)
IGAADIGKN

SEQ ID NO: 82722 - protein, 9 aa, synthetic construct
  source 1..9: note = Seed: VGAGDVGKS (KRAS G13D)
IGAADIGKS

SEQ ID NO: 82723 - protein, 9 aa, synthetic construct
  source 1..9: note = Seed: VGAGDVGKS (KRAS G13D)
IGAADIGKT

SEQ ID NO: 82724 - protein, 9 aa, synthetic construct
  source 1..9: note = Seed: VGAGDVGKS (KRAS G13D)
IGAADIGKV

SEQ ID NO: 82725 - protein, 9 aa, synthetic construct
  source 1..9: note = Seed: VGAGDVGKS (KRAS G13D)
IGAADLGKA

SEQ ID NO: 82726 - protein, 9 aa, synthetic construct
  source 1..9: note = Seed: VGAGDVGKS (KRAS G13D)
IGAADMGKA

SEQ ID NO: 82727 - protein, 9 aa, synthetic construct
  source 1..9: note = Seed: VGAGDVGKS (KRAS G13D)
IGAADMGKS

SEQ ID NO: 82728 - protein, 9 aa, synthetic construct
  source 1..9: note = Seed: VGAGDVGKS (KRAS G13D)
IGAADMGKV

SEQ ID NO: 82729 - protein, 9 aa, synthetic construct
  source 1..9: note = Seed: VGAGDVGKS (KRAS G13D)
IGAADPGKA

SEQ ID NO: 82730 - protein, 9 aa, synthetic construct
  source 1..9: note = Seed: VGAGDVGKS (KRAS G13D)
IGAADPGKI

SEQ ID NO: 82731 - protein, 9 aa, synthetic construct
  source 1..9: note = Seed: VGAGDVGKS (KRAS G13D)
IGAADPGKM

SEQ ID NO: 82732 - protein, 9 aa, synthetic construct
  source 1..9: note = Seed: VGAGDVGKS (KRAS G13D)
IGAADPGKN

SEQ ID NO: 82733 - protein, 9 aa, synthetic construct
  source 1..9: note = Seed: VGAGDVGKS (KRAS G13D)
IGAADPGKS

SEQ ID NO: 82734 - protein, 9 aa, synthetic construct
  source 1..9: note = Seed: VGAGDVGKS (KRAS G13D)
IGAADPGKT

SEQ ID NO: 82735 - protein, 9 aa, synthetic construct
  source 1..9: note = Seed: VGAGDVGKS (KRAS G13D)
IGAADPGKV

SEQ ID NO: 82736 - protein, 9 aa, synthetic construct
  source 1..9: note = Seed: VGAGDVGKS (KRAS G13D)
IGAADSGKA

SEQ ID NO: 82737 - protein, 9 aa, synthetic construct
  source 1..9: note = Seed: VGAGDVGKS (KRAS G13D)
IGAADSGKI

SEQ ID NO: 82738 - protein, 9 aa, synthetic construct
  source 1..9: note = Seed: VGAGDVGKS (KRAS G13D)
IGAADSGKL

SEQ ID NO: 82739 - protein, 9 aa, synthetic construct
  source 1..9: note = Seed: VGAGDVGKS (KRAS G13D)
IGAADSGKS

SEQ ID NO: 82740 - protein, 9 aa, synthetic construct
  source 1..9: note = Seed: VGAGDVGKS (KRAS G13D)
IGAADSGKT

SEQ ID NO: 82741 - protein, 9 aa, synthetic construct
  source 1..9: note = Seed: VGAGDVGKS (KRAS G13D)
IGAADSGKV

SEQ ID NO: 82742 - protein, 9 aa, synthetic construct
  source 1..9: note = Seed: VGAGDVGKS (KRAS G13D)
IGAADTGKA

SEQ ID NO: 82743 - protein, 9 aa, synthetic construct
  source 1..9: note = Seed: VGAGDVGKS (KRAS G13D)
IGAADTGKI

SEQ ID NO: 82744 - protein, 9 aa, synthetic construct
  source 1..9: note = Seed: VGAGDVGKS (KRAS G13D)
IGAADTGKS

SEQ ID NO: 82745 - protein, 9 aa, synthetic construct
  source 1..9: note = Seed: VGAGDVGKS (KRAS G13D)
IGAADTGKT

SEQ ID NO: 82746 - protein, 9 aa, synthetic construct
  source 1..9: note = Seed: VGAGDVGKS (KRAS G13D)
IGAADTGKV

SEQ ID NO: 82747 - protein, 9 aa, synthetic construct
  source 1..9: note = Seed: VGAGDVGKS (KRAS G13D)
IGAADVGKA

SEQ ID NO: 82748 - protein, 9 aa, synthetic construct
  source 1..9: note = Seed: VGAGDVGKS (KRAS G13D)
IGAADVGKG

SEQ ID NO: 82749 - protein, 9 aa, synthetic construct
  source 1..9: note = Seed: VGAGDVGKS (KRAS G13D)
IGAADVGKI

SEQ ID NO: 82750 - protein, 9 aa, synthetic construct
  source 1..9: note = Seed: VGAGDVGKS (KRAS G13D)
IGAADVGKM

SEQ ID NO: 82751 - protein, 9 aa, synthetic construct
  source 1..9: note = Seed: VGAGDVGKS (KRAS G13D)
IGAADVGKN

SEQ ID NO: 82752 - protein, 9 aa, synthetic construct
  source 1..9: note = Seed: VGAGDVGKS (KRAS G13D)
IGAADVGKS

SEQ ID NO: 82753 - protein, 9 aa, synthetic construct
  source 1..9: note = Seed: VGAGDVGKS (KRAS G13D)
IGAADVGKT

SEQ ID NO: 82754 - protein, 9 aa, synthetic construct
  source 1..9: note = Seed: VGAGDVGKS (KRAS G13D)
IGAADVGKV

SEQ ID NO: 82755 - protein, 9 aa, synthetic construct
  source 1..9: note = Seed: VGAGDVGKS (KRAS G13D)
IGAFDAGKA

SEQ ID NO: 82756 - protein, 9 aa, synthetic construct
  source 1..9: note = Seed: VGAGDVGKS (KRAS G13D)
IGAFDAGKI

SEQ ID NO: 82757 - protein, 9 aa, synthetic construct
  source 1..9: note = Seed: VGAGDVGKS (KRAS G13D)
IGAFDAGKS

SEQ ID NO: 82758 - protein, 9 aa, synthetic construct
  source 1..9: note = Seed: VGAGDVGKS (KRAS G13D)
IGAFDAGKV

SEQ ID NO: 82759 - protein, 9 aa, synthetic construct
  source 1..9: note = Seed: VGAGDVGKS (KRAS G13D)
IGAFDSGKA

SEQ ID NO: 82760 - protein, 9 aa, synthetic construct
  source 1..9: note = Seed: VGAGDVGKS (KRAS G13D)
IGAGDAGKA

SEQ ID NO: 82761 - protein, 9 aa, synthetic construct
  source 1..9: note = Seed: VGAGDVGKS (KRAS G13D)
IGAGDAGKC

SEQ ID NO: 82762 - protein, 9 aa, synthetic construct
  source 1..9: note = Seed: VGAGDVGKS (KRAS G13D)
IGAGDAGKG

SEQ ID NO: 82763 - protein, 9 aa, synthetic construct
  source 1..9: note = Seed: VGAGDVGKS (KRAS G13D)
IGAGDAGKI

SEQ ID NO: 82764 - protein, 9 aa, synthetic construct
  source 1..9: note = Seed: VGAGDVGKS (KRAS G13D)
IGAGDAGKL

SEQ ID NO: 82765 - protein, 9 aa, synthetic construct
  source 1..9: note = Seed: VGAGDVGKS (KRAS G13D)
IGAGDAGKM

SEQ ID NO: 82766 - protein, 9 aa, synthetic construct
  source 1..9: note = Seed: VGAGDVGKS (KRAS G13D)
IGAGDAGKN

SEQ ID NO: 82767 - protein, 9 aa, synthetic construct
  source 1..9: note = Seed: VGAGDVGKS (KRAS G13D)
IGAGDAGKS

SEQ ID NO: 82768 - protein, 9 aa, synthetic construct
  source 1..9: note = Seed: VGAGDVGKS (KRAS G13D)
IGAGDAGKT

SEQ ID NO: 82769 - protein, 9 aa, synthetic construct
  source 1..9: note = Seed: VGAGDVGKS (KRAS G13D)
IGAGDAGKV

SEQ ID NO: 82770 - protein, 9 aa, synthetic construct
  source 1..9: note = Seed: VGAGDVGKS (KRAS G13D)
IGAGDIGKA

SEQ ID NO: 82771 - protein, 9 aa, synthetic construct
  source 1..9: note = Seed: VGAGDVGKS (KRAS G13D)
IGAGDIGKI

SEQ ID NO: 82772 - protein, 9 aa, synthetic construct
  source 1..9: note = Seed: VGAGDVGKS (KRAS G13D)
IGAGDIGKS

SEQ ID NO: 82773 - protein, 9 aa, synthetic construct
  source 1..9: note = Seed: VGAGDVGKS (KRAS G13D)
IGAGDIGKT

SEQ ID NO: 82774 - protein, 9 aa, synthetic construct
  source 1..9: note = Seed: VGAGDVGKS (KRAS G13D)
IGAGDIGKV

SEQ ID NO: 82775 - protein, 9 aa, synthetic construct
  source 1..9: note = Seed: VGAGDVGKS (KRAS G13D)
IGAGDPGKA

SEQ ID NO: 82776 - protein, 9 aa, synthetic construct
  source 1..9: note = Seed: VGAGDVGKS (KRAS G13D)
IGAGDPGKI

SEQ ID NO: 82777 - protein, 9 aa, synthetic construct
  source 1..9: note = Seed: VGAGDVGKS (KRAS G13D)
IGAGDPGKS

SEQ ID NO: 82778 - protein, 9 aa, synthetic construct
  source 1..9: note = Seed: VGAGDVGKS (KRAS G13D)
IGAGDPGKT

SEQ ID NO: 82779 - protein, 9 aa, synthetic construct
  source 1..9: note = Seed: VGAGDVGKS (KRAS G13D)
IGAGDPGKV

SEQ ID NO: 82780 - protein, 9 aa, synthetic construct
  source 1..9: note = Seed: VGAGDVGKS (KRAS G13D)
IGAGDSGKA

SEQ ID NO: 82781 - protein, 9 aa, synthetic construct
  source 1..9: note = Seed: VGAGDVGKS (KRAS G13D)
IGAGDSGKV

SEQ ID NO: 82782 - protein, 9 aa, synthetic construct
  source 1..9: note = Seed: VGAGDVGKS (KRAS G13D)
IGAGDTGKA

SEQ ID NO: 82783 - protein, 9 aa, synthetic construct
  source 1..9: note = Seed: VGAGDVGKS (KRAS G13D)
IGAGDTGKV

SEQ ID NO: 82784 - protein, 9 aa, synthetic construct
  source 1..9: note = Seed: VGAGDVGKS (KRAS G13D)
IGAGDVGKA

SEQ ID NO: 82785 - protein, 9 aa, synthetic construct
  source 1..9: note = Seed: VGAGDVGKS (KRAS G13D)
IGAGDVGKG

SEQ ID NO: 82786 - protein, 9 aa, synthetic construct
  source 1..9: note = Seed: VGAGDVGKS (KRAS G13D)
IGAGDVGKI

SEQ ID NO: 82787 - protein, 9 aa, synthetic construct
  source 1..9: note = Seed: VGAGDVGKS (KRAS G13D)
IGAGDVGKL

SEQ ID NO: 82788 - protein, 9 aa, synthetic construct
  source 1..9: note = Seed: VGAGDVGKS (KRAS G13D)
IGAGDVGKM

SEQ ID NO: 82789 - protein, 9 aa, synthetic construct
  source 1..9: note = Seed: VGAGDVGKS (KRAS G13D)
IGAGDVGKN

SEQ ID NO: 82790 - protein, 9 aa, synthetic construct
  source 1..9: note = Seed: VGAGDVGKS (KRAS G13D)
IGAGDVGKS

SEQ ID NO: 82791 - protein, 9 aa, synthetic construct
  source 1..9: note = Seed: VGAGDVGKS (KRAS G13D)
IGAGDVGKT

SEQ ID NO: 82792 - protein, 9 aa, synthetic construct
  source 1..9: note = Seed: VGAGDVGKS (KRAS G13D)
IGAGDVGKV

SEQ ID NO: 82793 - protein, 9 aa, synthetic construct
  source 1..9: note = Seed: VGAGDVGKS (KRAS G13D)
IGAIDAGKA

SEQ ID NO: 82794 - protein, 9 aa, synthetic construct
  source 1..9: note = Seed: VGAGDVGKS (KRAS G13D)
IGAIDAGKI

SEQ ID NO: 82795 - protein, 9 aa, synthetic construct
  source 1..9: note = Seed: VGAGDVGKS (KRAS G13D)
IGAIDAGKL

SEQ ID NO: 82796 - protein, 9 aa, synthetic construct
  source 1..9: note = Seed: VGAGDVGKS (KRAS G13D)
IGAIDAGKM

SEQ ID NO: 82797 - protein, 9 aa, synthetic construct
  source 1..9: note = Seed: VGAGDVGKS (KRAS G13D)
IGAIDAGKS

SEQ ID NO: 82798 - protein, 9 aa, synthetic construct
  source 1..9: note = Seed: VGAGDVGKS (KRAS G13D)
IGAIDAGKT

SEQ ID NO: 82799 - protein, 9 aa, synthetic construct
  source 1..9: note = Seed: VGAGDVGKS (KRAS G13D)
IGAIDAGKV

SEQ ID NO: 82800 - protein, 9 aa, synthetic construct
  source 1..9: note = Seed: VGAGDVGKS (KRAS G13D)
IGAIDGGKA

SEQ ID NO: 82801 - protein, 9 aa, synthetic construct
  source 1..9: note = Seed: VGAGDVGKS (KRAS G13D)
IGAIDGGKI

SEQ ID NO: 82802 - protein, 9 aa, synthetic construct
  source 1..9: note = Seed: VGAGDVGKS (KRAS G13D)
IGAIDGGKL

SEQ ID NO: 82803 - protein, 9 aa, synthetic construct
  source 1..9: note = Seed: VGAGDVGKS (KRAS G13D)
IGAIDGGKM

SEQ ID NO: 82804 - protein, 9 aa, synthetic construct
  source 1..9: note = Seed: VGAGDVGKS (KRAS G13D)
IGAIDGGKV

SEQ ID NO: 82805 - protein, 9 aa, synthetic construct
  source 1..9: note = Seed: VGAGDVGKS (KRAS G13D)
IGAIDPGKI

SEQ ID NO: 82806 - protein, 9 aa, synthetic construct
  source 1..9: note = Seed: VGAGDVGKS (KRAS G13D)
IGAIDPGKL

SEQ ID NO: 82807 - protein, 9 aa, synthetic construct
  source 1..9: note = Seed: VGAGDVGKS (KRAS G13D)
IGAIDPGKV

SEQ ID NO: 82808 - protein, 9 aa, synthetic construct
  source 1..9: note = Seed: VGAGDVGKS (KRAS G13D)
IGAIDSGKA

SEQ ID NO: 82809 - protein, 9 aa, synthetic construct
  source 1..9: note = Seed: VGAGDVGKS (KRAS G13D)
IGAIDSGKI

SEQ ID NO: 82810 - protein, 9 aa, synthetic construct
  source 1..9: note = Seed: VGAGDVGKS (KRAS G13D)
IGAIDSGKL

SEQ ID NO: 82811 - protein, 9 aa, synthetic construct
  source 1..9: note = Seed: VGAGDVGKS (KRAS G13D)
IGAIDSGKV

SEQ ID NO: 82812 - protein, 9 aa, synthetic construct
  source 1..9: note = Seed: VGAGDVGKS (KRAS G13D)
IGALDAGKA

SEQ ID NO: 82813 - protein, 9 aa, synthetic construct
  source 1..9: note = Seed: VGAGDVGKS (KRAS G13D)
IGALDAGKC

SEQ ID NO: 82814 - protein, 9 aa, synthetic construct
  source 1..9: note = Seed: VGAGDVGKS (KRAS G13D)
IGALDAGKF

SEQ ID NO: 82815 - protein, 9 aa, synthetic construct
  source 1..9: note = Seed: VGAGDVGKS (KRAS G13D)
IGALDAGKG

SEQ ID NO: 82816 - protein, 9 aa, synthetic construct
  source 1..9: note = Seed: VGAGDVGKS (KRAS G13D)
IGALDAGKI

SEQ ID NO: 82817 - protein, 9 aa, synthetic construct
  source 1..9: note = Seed: VGAGDVGKS (KRAS G13D)
IGALDAGKL

SEQ ID NO: 82818 - protein, 9 aa, synthetic construct
  source 1..9: note = Seed: VGAGDVGKS (KRAS G13D)
IGALDAGKM

SEQ ID NO: 82819 - protein, 9 aa, synthetic construct
  source 1..9: note = Seed: VGAGDVGKS (KRAS G13D)
IGALDAGKS

SEQ ID NO: 82820 - protein, 9 aa, synthetic construct
  source 1..9: note = Seed: VGAGDVGKS (KRAS G13D)
IGALDAGKT

SEQ ID NO: 82821 - protein, 9 aa, synthetic construct
  source 1..9: note = Seed: VGAGDVGKS (KRAS G13D)
IGALDAGKV

SEQ ID NO: 82822 - protein, 9 aa, synthetic construct
  source 1..9: note = Seed: VGAGDVGKS (KRAS G13D)
IGALDGGKA

SEQ ID NO: 82823 - protein, 9 aa, synthetic construct
  source 1..9: note = Seed: VGAGDVGKS (KRAS G13D)
IGALDGGKI

SEQ ID NO: 82824 - protein, 9 aa, synthetic construct
  source 1..9: note = Seed: VGAGDVGKS (KRAS G13D)
IGALDGGKL

SEQ ID NO: 82825 - protein, 9 aa, synthetic construct
  source 1..9: note = Seed: VGAGDVGKS (KRAS G13D)
IGALDGGKM

SEQ ID NO: 82826 - protein, 9 aa, synthetic construct
  source 1..9: note = Seed: VGAGDVGKS (KRAS G13D)
IGALDGGKS

SEQ ID NO: 82827 - protein, 9 aa, synthetic construct
  source 1..9: note = Seed: VGAGDVGKS (KRAS G13D)
IGALDGGKT

SEQ ID NO: 82828 - protein, 9 aa, synthetic construct
  source 1..9: note = Seed: VGAGDVGKS (KRAS G13D)
IGALDGGKV

SEQ ID NO: 82829 - protein, 9 aa, synthetic construct
  source 1..9: note = Seed: VGAGDVGKS (KRAS G13D)
IGALDIGKA

SEQ ID NO: 82830 - protein, 9 aa, synthetic construct
  source 1..9: note = Seed: VGAGDVGKS (KRAS G13D)
IGALDLGKA

SEQ ID NO: 82831 - protein, 9 aa, synthetic construct
  source 1..9: note = Seed: VGAGDVGKS (KRAS G13D)
IGALDNGKA

SEQ ID NO: 82832 - protein, 9 aa, synthetic construct
  source 1..9: note = Seed: VGAGDVGKS (KRAS G13D)
IGALDNGKI

SEQ ID NO: 82833 - protein, 9 aa, synthetic construct
  source 1..9: note = Seed: VGAGDVGKS (KRAS G13D)
IGALDNGKL

SEQ ID NO: 82834 - protein, 9 aa, synthetic construct
  source 1..9: note = Seed: VGAGDVGKS (KRAS G13D)
IGALDNGKV

SEQ ID NO: 82835 - protein, 9 aa, synthetic construct
  source 1..9: note = Seed: VGAGDVGKS (KRAS G13D)
IGALDPGKA

SEQ ID NO: 82836 - protein, 9 aa, synthetic construct
  source 1..9: note = Seed: VGAGDVGKS (KRAS G13D)
IGALDPGKI

SEQ ID NO: 82837 - protein, 9 aa, synthetic construct
  source 1..9: note = Seed: VGAGDVGKS (KRAS G13D)
IGALDPGKL

SEQ ID NO: 82838 - protein, 9 aa, synthetic construct
  source 1..9: note = Seed: VGAGDVGKS (KRAS G13D)
IGALDPGKM

SEQ ID NO: 82839 - protein, 9 aa, synthetic construct
  source 1..9: note = Seed: VGAGDVGKS (KRAS G13D)
IGALDPGKT

SEQ ID NO: 82840 - protein, 9 aa, synthetic construct
  source 1..9: note = Seed: VGAGDVGKS (KRAS G13D)
IGALDPGKV

SEQ ID NO: 82841 - protein, 9 aa, synthetic construct
  source 1..9: note = Seed: VGAGDVGKS (KRAS G13D)
IGALDSGKA

SEQ ID NO: 82842 - protein, 9 aa, synthetic construct
  source 1..9: note = Seed: VGAGDVGKS (KRAS G13D)
IGALDSGKI

SEQ ID NO: 82843 - protein, 9 aa, synthetic construct
  source 1..9: note = Seed: VGAGDVGKS (KRAS G13D)
IGALDSGKL

SEQ ID NO: 82844 - protein, 9 aa, synthetic construct
  source 1..9: note = Seed: VGAGDVGKS (KRAS G13D)
IGALDSGKM

SEQ ID NO: 82845 - protein, 9 aa, synthetic construct
  source 1..9: note = Seed: VGAGDVGKS (KRAS G13D)
IGALDSGKS

SEQ ID NO: 82846 - protein, 9 aa, synthetic construct
  source 1..9: note = Seed: VGAGDVGKS (KRAS G13D)
IGALDSGKT

SEQ ID NO: 82847 - protein, 9 aa, synthetic construct
  source 1..9: note = Seed: VGAGDVGKS (KRAS G13D)
IGALDSGKV

SEQ ID NO: 82848 - protein, 9 aa, synthetic construct
  source 1..9: note = Seed: VGAGDVGKS (KRAS G13D)
IGALDTGKA

SEQ ID NO: 82849 - protein, 9 aa, synthetic construct
  source 1..9: note = Seed: VGAGDVGKS (KRAS G13D)
IGALDTGKI

SEQ ID NO: 82850 - protein, 9 aa, synthetic construct
  source 1..9: note = Seed: VGAGDVGKS (KRAS G13D)
IGALDTGKL

SEQ ID NO: 82851 - protein, 9 aa, synthetic construct
  source 1..9: note = Seed: VGAGDVGKS (KRAS G13D)
IGALDTGKM

SEQ ID NO: 82852 - protein, 9 aa, synthetic construct
  source 1..9: note = Seed: VGAGDVGKS (KRAS G13D)
IGALDTGKT

SEQ ID NO: 82853 - protein, 9 aa, synthetic construct
  source 1..9: note = Seed: VGAGDVGKS (KRAS G13D)
IGALDTGKV

SEQ ID NO: 82854 - protein, 9 aa, synthetic construct
  source 1..9: note = Seed: VGAGDVGKS (KRAS G13D)
IGALDVGKA

SEQ ID NO: 82855 - protein, 9 aa, synthetic construct
  source 1..9: note = Seed: VGAGDVGKS (KRAS G13D)
IGALDVGKI

SEQ ID NO: 82856 - protein, 9 aa, synthetic construct
  source 1..9: note = Seed: VGAGDVGKS (KRAS G13D)
IGALDVGKL

SEQ ID NO: 82857 - protein, 9 aa, synthetic construct
  source 1..9: note = Seed: VGAGDVGKS (KRAS G13D)
IGALDVGKV

SEQ ID NO: 82858 - protein, 9 aa, synthetic construct
  source 1..9: note = Seed: VGAGDVGKS (KRAS G13D)
IGAMDAGKA

SEQ ID NO: 82859 - protein, 9 aa, synthetic construct
  source 1..9: note = Seed: VGAGDVGKS (KRAS G13D)
IGAMDAGKI

SEQ ID NO: 82860 - protein, 9 aa, synthetic construct
  source 1..9: note = Seed: VGAGDVGKS (KRAS G13D)
IGAMDAGKL

SEQ ID NO: 82861 - protein, 9 aa, synthetic construct
  source 1..9: note = Seed: VGAGDVGKS (KRAS G13D)
IGAMDAGKM

SEQ ID NO: 82862 - protein, 9 aa, synthetic construct
  source 1..9: note = Seed: VGAGDVGKS (KRAS G13D)
IGAMDAGKS

SEQ ID NO: 82863 - protein, 9 aa, synthetic construct
  source 1..9: note = Seed: VGAGDVGKS (KRAS G13D)
IGAMDAGKT

SEQ ID NO: 82864 - protein, 9 aa, synthetic construct
  source 1..9: note = Seed: VGAGDVGKS (KRAS G13D)
IGAMDAGKV

SEQ ID NO: 82865 - protein, 9 aa, synthetic construct
  source 1..9: note = Seed: VGAGDVGKS (KRAS G13D)
IGAMDGGKA

SEQ ID NO: 82866 - protein, 9 aa, synthetic construct
  source 1..9: note = Seed: VGAGDVGKS (KRAS G13D)
IGAMDGGKI

SEQ ID NO: 82867 - protein, 9 aa, synthetic construct
  source 1..9: note = Seed: VGAGDVGKS (KRAS G13D)
IGAMDGGKL

SEQ ID NO: 82868 - protein, 9 aa, synthetic construct
  source 1..9: note = Seed: VGAGDVGKS (KRAS G13D)
IGAMDGGKM

SEQ ID NO: 82869 - protein, 9 aa, synthetic construct
  source 1..9: note = Seed: VGAGDVGKS (KRAS G13D)
IGAMDGGKS

SEQ ID NO: 82870 - protein, 9 aa, synthetic construct
  source 1..9: note = Seed: VGAGDVGKS (KRAS G13D)
IGAMDGGKT

SEQ ID NO: 82871 - protein, 9 aa, synthetic construct
  source 1..9: note = Seed: VGAGDVGKS (KRAS G13D)
IGAMDGGKV

SEQ ID NO: 82872 - protein, 9 aa, synthetic construct
  source 1..9: note = Seed: VGAGDVGKS (KRAS G13D)
IGAMDNGKA

SEQ ID NO: 82873 - protein, 9 aa, synthetic construct
  source 1..9: note = Seed: VGAGDVGKS (KRAS G13D)
IGAMDNGKI

SEQ ID NO: 82874 - protein, 9 aa, synthetic construct
  source 1..9: note = Seed: VGAGDVGKS (KRAS G13D)
IGAMDNGKL

SEQ ID NO: 82875 - protein, 9 aa, synthetic construct
  source 1..9: note = Seed: VGAGDVGKS (KRAS G13D)
IGAMDNGKV

SEQ ID NO: 82876 - protein, 9 aa, synthetic construct
  source 1..9: note = Seed: VGAGDVGKS (KRAS G13D)
IGAMDPGKA

SEQ ID NO: 82877 - protein, 9 aa, synthetic construct
  source 1..9: note = Seed: VGAGDVGKS (KRAS G13D)
IGAMDPGKI

SEQ ID NO: 82878 - protein, 9 aa, synthetic construct
  source 1..9: note = Seed: VGAGDVGKS (KRAS G13D)
IGAMDPGKL

SEQ ID NO: 82879 - protein, 9 aa, synthetic construct
  source 1..9: note = Seed: VGAGDVGKS (KRAS G13D)
IGAMDPGKM

SEQ ID NO: 82880 - protein, 9 aa, synthetic construct
  source 1..9: note = Seed: VGAGDVGKS (KRAS G13D)
IGAMDPGKV

SEQ ID NO: 82881 - protein, 9 aa, synthetic construct
  source 1..9: note = Seed: VGAGDVGKS (KRAS G13D)
IGAMDSGKA

SEQ ID NO: 82882 - protein, 9 aa, synthetic construct
  source 1..9: note = Seed: VGAGDVGKS (KRAS G13D)
IGAMDSGKI

SEQ ID NO: 82883 - protein, 9 aa, synthetic construct
  source 1..9: note = Seed: VGAGDVGKS (KRAS G13D)
IGAMDSGKL

SEQ ID NO: 82884 - protein, 9 aa, synthetic construct
  source 1..9: note = Seed: VGAGDVGKS (KRAS G13D)
IGAMDSGKM

SEQ ID NO: 82885 - protein, 9 aa, synthetic construct
  source 1..9: note = Seed: VGAGDVGKS (KRAS G13D)
IGAMDSGKS

SEQ ID NO: 82886 - protein, 9 aa, synthetic construct
  source 1..9: note = Seed: VGAGDVGKS (KRAS G13D)
IGAMDSGKT

SEQ ID NO: 82887 - protein, 9 aa, synthetic construct
  source 1..9: note = Seed: VGAGDVGKS (KRAS G13D)
IGAMDSGKV

SEQ ID NO: 82888 - protein, 9 aa, synthetic construct
  source 1..9: note = Seed: VGAGDVGKS (KRAS G13D)
IGAMDTGKA

SEQ ID NO: 82889 - protein, 9 aa, synthetic construct
  source 1..9: note = Seed: VGAGDVGKS (KRAS G13D)
IGAMDTGKI

SEQ ID NO: 82890 - protein, 9 aa, synthetic construct
  source 1..9: note = Seed: VGAGDVGKS (KRAS G13D)
IGAMDTGKL

SEQ ID NO: 82891 - protein, 9 aa, synthetic construct
  source 1..9: note = Seed: VGAGDVGKS (KRAS G13D)
IGAMDTGKV

SEQ ID NO: 82892 - protein, 9 aa, synthetic construct
  source 1..9: note = Seed: VGAGDVGKS (KRAS G13D)
IGAMDVGKA

SEQ ID NO: 82893 - protein, 9 aa, synthetic construct
  source 1..9: note = Seed: VGAGDVGKS (KRAS G13D)
IGAMDVGKI

SEQ ID NO: 82894 - protein, 9 aa, synthetic construct
  source 1..9: note = Seed: VGAGDVGKS (KRAS G13D)
IGAMDVGKL

SEQ ID NO: 82895 - protein, 9 aa, synthetic construct
  source 1..9: note = Seed: VGAGDVGKS (KRAS G13D)
IGAMDVGKV

SEQ ID NO: 82896 - protein, 9 aa, synthetic construct
  source 1..9: note = Seed: VGAGDVGKS (KRAS G13D)
IGAQDAGKA

SEQ ID NO: 82897 - protein, 9 aa, synthetic construct
  source 1..9: note = Seed: VGAGDVGKS (KRAS G13D)
IGAQDAGKI

SEQ ID NO: 82898 - protein, 9 aa, synthetic construct
  source 1..9: note = Seed: VGAGDVGKS (KRAS G13D)
IGAQDAGKL

SEQ ID NO: 82899 - protein, 9 aa, synthetic construct
  source 1..9: note = Seed: VGAGDVGKS (KRAS G13D)
IGAQDAGKM

SEQ ID NO: 82900 - protein, 9 aa, synthetic construct
  source 1..9: note = Seed: VGAGDVGKS (KRAS G13D)
IGAQDAGKV

SEQ ID NO: 82901 - protein, 9 aa, synthetic construct
  source 1..9: note = Seed: VGAGDVGKS (KRAS G13D)
IGAQDGGKL

SEQ ID NO: 82902 - protein, 9 aa, synthetic construct
  source 1..9: note = Seed: VGAGDVGKS (KRAS G13D)
IGAQDSGKL

SEQ ID NO: 82903 - protein, 9 aa, synthetic construct
  source 1..9: note = Seed: VGAGDVGKS (KRAS G13D)
IGASDAGKA

SEQ ID NO: 82904 - protein, 9 aa, synthetic construct
  source 1..9: note = Seed: VGAGDVGKS (KRAS G13D)
IGASDAGKI

SEQ ID NO: 82905 - protein, 9 aa, synthetic construct
  source 1..9: note = Seed: VGAGDVGKS (KRAS G13D)
IGASDAGKS

SEQ ID NO: 82906 - protein, 9 aa, synthetic construct
  source 1..9: note = Seed: VGAGDVGKS (KRAS G13D)
IGASDAGKT

SEQ ID NO: 82907 - protein, 9 aa, synthetic construct
  source 1..9: note = Seed: VGAGDVGKS (KRAS G13D)
IGASDAGKV

SEQ ID NO: 82908 - protein, 9 aa, synthetic construct
  source 1..9: note = Seed: VGAGDVGKS (KRAS G13D)
IGASDIGKA

SEQ ID NO: 82909 - protein, 9 aa, synthetic construct
  source 1..9: note = Seed: VGAGDVGKS (KRAS G13D)
IGASDPGKA

SEQ ID NO: 82910 - protein, 9 aa, synthetic construct
  source 1..9: note = Seed: VGAGDVGKS (KRAS G13D)
IGASDPGKV

SEQ ID NO: 82911 - protein, 9 aa, synthetic construct
  source 1..9: note = Seed: VGAGDVGKS (KRAS G13D)
IGASDSGKA

SEQ ID NO: 82912 - protein, 9 aa, synthetic construct
  source 1..9: note = Seed: VGAGDVGKS (KRAS G13D)
IGASDVGKA

SEQ ID NO: 82913 - protein, 9 aa, synthetic construct
  source 1..9: note = Seed: VGAGDVGKS (KRAS G13D)
IGASDVGKS

SEQ ID NO: 82914 - protein, 9 aa, synthetic construct
  source 1..9: note = Seed: VGAGDVGKS (KRAS G13D)
IGASDVGKT

SEQ ID NO: 82915 - protein, 9 aa, synthetic construct
  source 1..9: note = Seed: VGAGDVGKS (KRAS G13D)
IGASDVGKV

SEQ ID NO: 82916 - protein, 9 aa, synthetic construct
  source 1..9: note = Seed: VGAGDVGKS (KRAS G13D)
IGATDAGKS

SEQ ID NO: 82917 - protein, 9 aa, synthetic construct
  source 1..9: note = Seed: VGAGDVGKS (KRAS G13D)
IGAVDAGKA

SEQ ID NO: 82918 - protein, 9 aa, synthetic construct
  source 1..9: note = Seed: VGAGDVGKS (KRAS G13D)
IGAVDAGKI

SEQ ID NO: 82919 - protein, 9 aa, synthetic construct
  source 1..9: note = Seed: VGAGDVGKS (KRAS G13D)
IGAVDAGKL

SEQ ID NO: 82920 - protein, 9 aa, synthetic construct
  source 1..9: note = Seed: VGAGDVGKS (KRAS G13D)
IGAVDAGKV

SEQ ID NO: 82921 - protein, 9 aa, synthetic construct
  source 1..9: note = Seed: VGAGDVGKS (KRAS G13D)
IGAVDGGKI

SEQ ID NO: 82922 - protein, 9 aa, synthetic construct
  source 1..9: note = Seed: VGAGDVGKS (KRAS G13D)
IGAVDGGKL

SEQ ID NO: 82923 - protein, 9 aa, synthetic construct
  source 1..9: note = Seed: VGAGDVGKS (KRAS G13D)
IGAVDGGKV

SEQ ID NO: 82924 - protein, 9 aa, synthetic construct
  source 1..9: note = Seed: VGAGDVGKS (KRAS G13D)
IGAVDSGKL

SEQ ID NO: 82925 - protein, 9 aa, synthetic construct
  source 1..9: note = Seed: VGAGDVGKS (KRAS G13D)
IGAVDSGKV

SEQ ID NO: 82926 - protein, 9 aa, synthetic construct
  source 1..9: note = Seed: VGAGDVGKS (KRAS G13D)
LGAADAGKA

SEQ ID NO: 82927 - protein, 9 aa, synthetic construct
  source 1..9: note = Seed: VGAGDVGKS (KRAS G13D)
LGAADAGKG

SEQ ID NO: 82928 - protein, 9 aa, synthetic construct
  source 1..9: note = Seed: VGAGDVGKS (KRAS G13D)
LGAADAGKI

SEQ ID NO: 82929 - protein, 9 aa, synthetic construct
  source 1..9: note = Seed: VGAGDVGKS (KRAS G13D)
LGAADAGKL

SEQ ID NO: 82930 - protein, 9 aa, synthetic construct
  source 1..9: note = Seed: VGAGDVGKS (KRAS G13D)
LGAADAGKM

SEQ ID NO: 82931 - protein, 9 aa, synthetic construct
  source 1..9: note = Seed: VGAGDVGKS (KRAS G13D)
LGAADAGKS

SEQ ID NO: 82932 - protein, 9 aa, synthetic construct
  source 1..9: note = Seed: VGAGDVGKS (KRAS G13D)
LGAADAGKT

SEQ ID NO: 82933 - protein, 9 aa, synthetic construct
  source 1..9: note = Seed: VGAGDVGKS (KRAS G13D)
LGAADAGKV

SEQ ID NO: 82934 - protein, 9 aa, synthetic construct
  source 1..9: note = Seed: VGAGDVGKS (KRAS G13D)
LGAADGGKL

SEQ ID NO: 82935 - protein, 9 aa, synthetic construct
  source 1..9: note = Seed: VGAGDVGKS (KRAS G13D)
LGAADGGKV

SEQ ID NO: 82936 - protein, 9 aa, synthetic construct
  source 1..9: note = Seed: VGAGDVGKS (KRAS G13D)
LGAADIGKA

SEQ ID NO: 82937 - protein, 9 aa, synthetic construct
  source 1..9: note = Seed: VGAGDVGKS (KRAS G13D)
LGAADIGKS

SEQ ID NO: 82938 - protein, 9 aa, synthetic construct
  source 1..9: note = Seed: VGAGDVGKS (KRAS G13D)
LGAADPGKA

SEQ ID NO: 82939 - protein, 9 aa, synthetic construct
  source 1..9: note = Seed: VGAGDVGKS (KRAS G13D)
LGAADPGKI

SEQ ID NO: 82940 - protein, 9 aa, synthetic construct
  source 1..9: note = Seed: VGAGDVGKS (KRAS G13D)
LGAADPGKS

SEQ ID NO: 82941 - protein, 9 aa, synthetic construct
  source 1..9: note = Seed: VGAGDVGKS (KRAS G13D)
LGAADPGKT

SEQ ID NO: 82942 - protein, 9 aa, synthetic construct
  source 1..9: note = Seed: VGAGDVGKS (KRAS G13D)
LGAADPGKV

SEQ ID NO: 82943 - protein, 9 aa, synthetic construct
  source 1..9: note = Seed: VGAGDVGKS (KRAS G13D)
LGAADSGKA

SEQ ID NO: 82944 - protein, 9 aa, synthetic construct
  source 1..9: note = Seed: VGAGDVGKS (KRAS G13D)
LGAADSGKI

SEQ ID NO: 82945 - protein, 9 aa, synthetic construct
  source 1..9: note = Seed: VGAGDVGKS (KRAS G13D)
LGAADSGKL

SEQ ID NO: 82946 - protein, 9 aa, synthetic construct
  source 1..9: note = Seed: VGAGDVGKS (KRAS G13D)
LGAADSGKV

SEQ ID NO: 82947 - protein, 9 aa, synthetic construct
  source 1..9: note = Seed: VGAGDVGKS (KRAS G13D)
LGAADVGKA

SEQ ID NO: 82948 - protein, 9 aa, synthetic construct
  source 1..9: note = Seed: VGAGDVGKS (KRAS G13D)
LGAADVGKI

SEQ ID NO: 82949 - protein, 9 aa, synthetic construct
  source 1..9: note = Seed: VGAGDVGKS (KRAS G13D)
LGAADVGKS

SEQ ID NO: 82950 - protein, 9 aa, synthetic construct
  source 1..9: note = Seed: VGAGDVGKS (KRAS G13D)
LGAADVGKT

SEQ ID NO: 82951 - protein, 9 aa, synthetic construct
  source 1..9: note = Seed: VGAGDVGKS (KRAS G13D)
LGAADVGKV

SEQ ID NO: 82952 - protein, 9 aa, synthetic construct
  source 1..9: note = Seed: VGAGDVGKS (KRAS G13D)
LGAFDAGKA

SEQ ID NO: 82953 - protein, 9 aa, synthetic construct
  source 1..9: note = Seed: VGAGDVGKS (KRAS G13D)
LGAFDAGKI

SEQ ID NO: 82954 - protein, 9 aa, synthetic construct
  source 1..9: note = Seed: VGAGDVGKS (KRAS G13D)
LGAFDAGKV

SEQ ID NO: 82955 - protein, 9 aa, synthetic construct
  source 1..9: note = Seed: VGAGDVGKS (KRAS G13D)
LGAGDAGKA

SEQ ID NO: 82956 - protein, 9 aa, synthetic construct
  source 1..9: note = Seed: VGAGDVGKS (KRAS G13D)
LGAGDAGKI

SEQ ID NO: 82957 - protein, 9 aa, synthetic construct
  source 1..9: note = Seed: VGAGDVGKS (KRAS G13D)
LGAGDAGKS

SEQ ID NO: 82958 - protein, 9 aa, synthetic construct
  source 1..9: note = Seed: VGAGDVGKS (KRAS G13D)
LGAGDAGKT

SEQ ID NO: 82959 - protein, 9 aa, synthetic construct
  source 1..9: note = Seed: VGAGDVGKS (KRAS G13D)
LGAGDAGKV

SEQ ID NO: 82960 - protein, 9 aa, synthetic construct
  source 1..9: note = Seed: VGAGDVGKS (KRAS G13D)
LGAGDPGKA

SEQ ID NO: 82961 - protein, 9 aa, synthetic construct
  source 1..9: note = Seed: VGAGDVGKS (KRAS G13D)
LGAGDVGKA

SEQ ID NO: 82962 - protein, 9 aa, synthetic construct
  source 1..9: note = Seed: VGAGDVGKS (KRAS G13D)
LGAGDVGKS

SEQ ID NO: 82963 - protein, 9 aa, synthetic construct
  source 1..9: note = Seed: VGAGDVGKS (KRAS G13D)
LGAGDVGKT

SEQ ID NO: 82964 - protein, 9 aa, synthetic construct
  source 1..9: note = Seed: VGAGDVGKS (KRAS G13D)
LGAGDVGKV

SEQ ID NO: 82965 - protein, 9 aa, synthetic construct
  source 1..9: note = Seed: VGAGDVGKS (KRAS G13D)
LGAIDAGKA

SEQ ID NO: 82966 - protein, 9 aa, synthetic construct
  source 1..9: note = Seed: VGAGDVGKS (KRAS G13D)
LGAIDAGKI

SEQ ID NO: 82967 - protein, 9 aa, synthetic construct
  source 1..9: note = Seed: VGAGDVGKS (KRAS G13D)
LGAIDAGKL

SEQ ID NO: 82968 - protein, 9 aa, synthetic construct
  source 1..9: note = Seed: VGAGDVGKS (KRAS G13D)
LGAIDAGKM

SEQ ID NO: 82969 - protein, 9 aa, synthetic construct
  source 1..9: note = Seed: VGAGDVGKS (KRAS G13D)
LGAIDAGKS

SEQ ID NO: 82970 - protein, 9 aa, synthetic construct
  source 1..9: note = Seed: VGAGDVGKS (KRAS G13D)
LGAIDAGKT

SEQ ID NO: 82971 - protein, 9 aa, synthetic construct
  source 1..9: note = Seed: VGAGDVGKS (KRAS G13D)
LGAIDAGKV

SEQ ID NO: 82972 - protein, 9 aa, synthetic construct
  source 1..9: note = Seed: VGAGDVGKS (KRAS G13D)
LGAIDGGKA

SEQ ID NO: 82973 - protein, 9 aa, synthetic construct
  source 1..9: note = Seed: VGAGDVGKS (KRAS G13D)
LGAIDGGKI

SEQ ID NO: 82974 - protein, 9 aa, synthetic construct
  source 1..9: note = Seed: VGAGDVGKS (KRAS G13D)
LGAIDGGKL

SEQ ID NO: 82975 - protein, 9 aa, synthetic construct
  source 1..9: note = Seed: VGAGDVGKS (KRAS G13D)
LGAIDGGKV

SEQ ID NO: 82976 - protein, 9 aa, synthetic construct
  source 1..9: note = Seed: VGAGDVGKS (KRAS G13D)
LGAIDSGKA

SEQ ID NO: 82977 - protein, 9 aa, synthetic construct
  source 1..9: note = Seed: VGAGDVGKS (KRAS G13D)
LGAIDSGKI

SEQ ID NO: 82978 - protein, 9 aa, synthetic construct
  source 1..9: note = Seed: VGAGDVGKS (KRAS G13D)
LGAIDSGKL

SEQ ID NO: 82979 - protein, 9 aa, synthetic construct
  source 1..9: note = Seed: VGAGDVGKS (KRAS G13D)
LGAIDSGKV

SEQ ID NO: 82980 - protein, 9 aa, synthetic construct
  source 1..9: note = Seed: VGAGDVGKS (KRAS G13D)
LGALDAGKA

SEQ ID NO: 82981 - protein, 9 aa, synthetic construct
  source 1..9: note = Seed: VGAGDVGKS (KRAS G13D)
LGALDAGKC

SEQ ID NO: 82982 - protein, 9 aa, synthetic construct
  source 1..9: note = Seed: VGAGDVGKS (KRAS G13D)
LGALDAGKG

SEQ ID NO: 82983 - protein, 9 aa, synthetic construct
  source 1..9: note = Seed: VGAGDVGKS (KRAS G13D)
LGALDAGKH

SEQ ID NO: 82984 - protein, 9 aa, synthetic construct
  source 1..9: note = Seed: VGAGDVGKS (KRAS G13D)
LGALDAGKI

SEQ ID NO: 82985 - protein, 9 aa, synthetic construct
  source 1..9: note = Seed: VGAGDVGKS (KRAS G13D)
LGALDAGKK

SEQ ID NO: 82986 - protein, 9 aa, synthetic construct
  source 1..9: note = Seed: VGAGDVGKS (KRAS G13D)
LGALDAGKL

SEQ ID NO: 82987 - protein, 9 aa, synthetic construct
  source 1..9: note = Seed: VGAGDVGKS (KRAS G13D)
LGALDAGKM

SEQ ID NO: 82988 - protein, 9 aa, synthetic construct
  source 1..9: note = Seed: VGAGDVGKS (KRAS G13D)
LGALDAGKN

SEQ ID NO: 82989 - protein, 9 aa, synthetic construct
  source 1..9: note = Seed: VGAGDVGKS (KRAS G13D)
LGALDAGKR

SEQ ID NO: 82990 - protein, 9 aa, synthetic construct
  source 1..9: note = Seed: VGAGDVGKS (KRAS G13D)
LGALDAGKS

SEQ ID NO: 82991 - protein, 9 aa, synthetic construct
  source 1..9: note = Seed: VGAGDVGKS (KRAS G13D)
LGALDAGKT

SEQ ID NO: 82992 - protein, 9 aa, synthetic construct
  source 1..9: note = Seed: VGAGDVGKS (KRAS G13D)
LGALDAGKV

SEQ ID NO: 82993 - protein, 9 aa, synthetic construct
  source 1..9: note = Seed: VGAGDVGKS (KRAS G13D)
LGALDGGKA

SEQ ID NO: 82994 - protein, 9 aa, synthetic construct
  source 1..9: note = Seed: VGAGDVGKS (KRAS G13D)
LGALDGGKI

SEQ ID NO: 82995 - protein, 9 aa, synthetic construct
  source 1..9: note = Seed: VGAGDVGKS (KRAS G13D)
LGALDGGKL

SEQ ID NO: 82996 - protein, 9 aa, synthetic construct
  source 1..9: note = Seed: VGAGDVGKS (KRAS G13D)
LGALDGGKM

SEQ ID NO: 82997 - protein, 9 aa, synthetic construct
  source 1..9: note = Seed: VGAGDVGKS (KRAS G13D)
LGALDGGKS

SEQ ID NO: 82998 - protein, 9 aa, synthetic construct
  source 1..9: note = Seed: VGAGDVGKS (KRAS G13D)
LGALDGGKT

SEQ ID NO: 82999 - protein, 9 aa, synthetic construct
  source 1..9: note = Seed: VGAGDVGKS (KRAS G13D)
LGALDGGKV

SEQ ID NO: 83000 - protein, 9 aa, synthetic construct
  source 1..9: note = Seed: VGAGDVGKS (KRAS G13D)
LGALDIGKA

SEQ ID NO: 83001 - protein, 9 aa, synthetic construct
  source 1..9: note = Seed: VGAGDVGKS (KRAS G13D)
LGALDNGKA

SEQ ID NO: 83002 - protein, 9 aa, synthetic construct
  source 1..9: note = Seed: VGAGDVGKS (KRAS G13D)
LGALDNGKI

SEQ ID NO: 83003 - protein, 9 aa, synthetic construct
  source 1..9: note = Seed: VGAGDVGKS (KRAS G13D)
LGALDNGKL

SEQ ID NO: 83004 - protein, 9 aa, synthetic construct
  source 1..9: note = Seed: VGAGDVGKS (KRAS G13D)
LGALDNGKV

SEQ ID NO: 83005 - protein, 9 aa, synthetic construct
  source 1..9: note = Seed: VGAGDVGKS (KRAS G13D)
LGALDPGKA

SEQ ID NO: 83006 - protein, 9 aa, synthetic construct
  source 1..9: note = Seed: VGAGDVGKS (KRAS G13D)
LGALDPGKI

SEQ ID NO: 83007 - protein, 9 aa, synthetic construct
  source 1..9: note = Seed: VGAGDVGKS (KRAS G13D)
LGALDPGKL

SEQ ID NO: 83008 - protein, 9 aa, synthetic construct
  source 1..9: note = Seed: VGAGDVGKS (KRAS G13D)
LGALDPGKM

SEQ ID NO: 83009 - protein, 9 aa, synthetic construct
  source 1..9: note = Seed: VGAGDVGKS (KRAS G13D)
LGALDPGKT

SEQ ID NO: 83010 - protein, 9 aa, synthetic construct
  source 1..9: note = Seed: VGAGDVGKS (KRAS G13D)
LGALDPGKV

SEQ ID NO: 83011 - protein, 9 aa, synthetic construct
  source 1..9: note = Seed: VGAGDVGKS (KRAS G13D)
LGALDSGKA

SEQ ID NO: 83012 - protein, 9 aa, synthetic construct
  source 1..9: note = Seed: VGAGDVGKS (KRAS G13D)
LGALDSGKI

SEQ ID NO: 83013 - protein, 9 aa, synthetic construct
  source 1..9: note = Seed: VGAGDVGKS (KRAS G13D)
LGALDSGKL

SEQ ID NO: 83014 - protein, 9 aa, synthetic construct
  source 1..9: note = Seed: VGAGDVGKS (KRAS G13D)
LGALDSGKM

SEQ ID NO: 83015 - protein, 9 aa, synthetic construct
  source 1..9: note = Seed: VGAGDVGKS (KRAS G13D)
LGALDSGKS

SEQ ID NO: 83016 - protein, 9 aa, synthetic construct
  source 1..9: note = Seed: VGAGDVGKS (KRAS G13D)
LGALDSGKT

SEQ ID NO: 83017 - protein, 9 aa, synthetic construct
  source 1..9: note = Seed: VGAGDVGKS (KRAS G13D)
LGALDSGKV

SEQ ID NO: 83018 - protein, 9 aa, synthetic construct
  source 1..9: note = Seed: VGAGDVGKS (KRAS G13D)
LGALDTGKA

SEQ ID NO: 83019 - protein, 9 aa, synthetic construct
  source 1..9: note = Seed: VGAGDVGKS (KRAS G13D)
LGALDTGKI

SEQ ID NO: 83020 - protein, 9 aa, synthetic construct
  source 1..9: note = Seed: VGAGDVGKS (KRAS G13D)
LGALDTGKL

SEQ ID NO: 83021 - protein, 9 aa, synthetic construct
  source 1..9: note = Seed: VGAGDVGKS (KRAS G13D)
LGALDTGKM

SEQ ID NO: 83022 - protein, 9 aa, synthetic construct
  source 1..9: note = Seed: VGAGDVGKS (KRAS G13D)
LGALDTGKS

SEQ ID NO: 83023 - protein, 9 aa, synthetic construct
  source 1..9: note = Seed: VGAGDVGKS (KRAS G13D)
LGALDTGKT

SEQ ID NO: 83024 - protein, 9 aa, synthetic construct
  source 1..9: note = Seed: VGAGDVGKS (KRAS G13D)
LGALDTGKV

SEQ ID NO: 83025 - protein, 9 aa, synthetic construct
  source 1..9: note = Seed: VGAGDVGKS (KRAS G13D)
LGALDVGKA

SEQ ID NO: 83026 - protein, 9 aa, synthetic construct
  source 1..9: note = Seed: VGAGDVGKS (KRAS G13D)
LGALDVGKI

SEQ ID NO: 83027 - protein, 9 aa, synthetic construct
  source 1..9: note = Seed: VGAGDVGKS (KRAS G13D)
LGALDVGKL

SEQ ID NO: 83028 - protein, 9 aa, synthetic construct
  source 1..9: note = Seed: VGAGDVGKS (KRAS G13D)
LGALDVGKS

SEQ ID NO: 83029 - protein, 9 aa, synthetic construct
  source 1..9: note = Seed: VGAGDVGKS (KRAS G13D)
LGALDVGKV

SEQ ID NO: 83030 - protein, 9 aa, synthetic construct
  source 1..9: note = Seed: VGAGDVGKS (KRAS G13D)
LGAMDAGKA

SEQ ID NO: 83031 - protein, 9 aa, synthetic construct
  source 1..9: note = Seed: VGAGDVGKS (KRAS G13D)
LGAMDAGKG

SEQ ID NO: 83032 - protein, 9 aa, synthetic construct
  source 1..9: note = Seed: VGAGDVGKS (KRAS G13D)
LGAMDAGKH

SEQ ID NO: 83033 - protein, 9 aa, synthetic construct
  source 1..9: note = Seed: VGAGDVGKS (KRAS G13D)
LGAMDAGKI

SEQ ID NO: 83034 - protein, 9 aa, synthetic construct
  source 1..9: note = Seed: VGAGDVGKS (KRAS G13D)
LGAMDAGKL

SEQ ID NO: 83035 - protein, 9 aa, synthetic construct
  source 1..9: note = Seed: VGAGDVGKS (KRAS G13D)
LGAMDAGKM

SEQ ID NO: 83036 - protein, 9 aa, synthetic construct
  source 1..9: note = Seed: VGAGDVGKS (KRAS G13D)
LGAMDAGKS

SEQ ID NO: 83037 - protein, 9 aa, synthetic construct
  source 1..9: note = Seed: VGAGDVGKS (KRAS G13D)
LGAMDAGKT

SEQ ID NO: 83038 - protein, 9 aa, synthetic construct
  source 1..9: note = Seed: VGAGDVGKS (KRAS G13D)
LGAMDAGKV

SEQ ID NO: 83039 - protein, 9 aa, synthetic construct
  source 1..9: note = Seed: VGAGDVGKS (KRAS G13D)
LGAMDGGKA

SEQ ID NO: 83040 - protein, 9 aa, synthetic construct
  source 1..9: note = Seed: VGAGDVGKS (KRAS G13D)
LGAMDGGKI

SEQ ID NO: 83041 - protein, 9 aa, synthetic construct
  source 1..9: note = Seed: VGAGDVGKS (KRAS G13D)
LGAMDGGKL

SEQ ID NO: 83042 - protein, 9 aa, synthetic construct
  source 1..9: note = Seed: VGAGDVGKS (KRAS G13D)
LGAMDGGKM

SEQ ID NO: 83043 - protein, 9 aa, synthetic construct
  source 1..9: note = Seed: VGAGDVGKS (KRAS G13D)
LGAMDGGKS

SEQ ID NO: 83044 - protein, 9 aa, synthetic construct
  source 1..9: note = Seed: VGAGDVGKS (KRAS G13D)
LGAMDGGKT

SEQ ID NO: 83045 - protein, 9 aa, synthetic construct
  source 1..9: note = Seed: VGAGDVGKS (KRAS G13D)
LGAMDGGKV

SEQ ID NO: 83046 - protein, 9 aa, synthetic construct
  source 1..9: note = Seed: VGAGDVGKS (KRAS G13D)
LGAMDNGKA

SEQ ID NO: 83047 - protein, 9 aa, synthetic construct
  source 1..9: note = Seed: VGAGDVGKS (KRAS G13D)
LGAMDNGKI

SEQ ID NO: 83048 - protein, 9 aa, synthetic construct
  source 1..9: note = Seed: VGAGDVGKS (KRAS G13D)
LGAMDNGKL

SEQ ID NO: 83049 - protein, 9 aa, synthetic construct
  source 1..9: note = Seed: VGAGDVGKS (KRAS G13D)
LGAMDNGKV

SEQ ID NO: 83050 - protein, 9 aa, synthetic construct
  source 1..9: note = Seed: VGAGDVGKS (KRAS G13D)
LGAMDPGKA

SEQ ID NO: 83051 - protein, 9 aa, synthetic construct
  source 1..9: note = Seed: VGAGDVGKS (KRAS G13D)
LGAMDPGKI

SEQ ID NO: 83052 - protein, 9 aa, synthetic construct
  source 1..9: note = Seed: VGAGDVGKS (KRAS G13D)
LGAMDPGKL

SEQ ID NO: 83053 - protein, 9 aa, synthetic construct
  source 1..9: note = Seed: VGAGDVGKS (KRAS G13D)
LGAMDPGKM

SEQ ID NO: 83054 - protein, 9 aa, synthetic construct
  source 1..9: note = Seed: VGAGDVGKS (KRAS G13D)
LGAMDPGKV

SEQ ID NO: 83055 - protein, 9 aa, synthetic construct
  source 1..9: note = Seed: VGAGDVGKS (KRAS G13D)
LGAMDSGKA

SEQ ID NO: 83056 - protein, 9 aa, synthetic construct
  source 1..9: note = Seed: VGAGDVGKS (KRAS G13D)
LGAMDSGKI

SEQ ID NO: 83057 - protein, 9 aa, synthetic construct
  source 1..9: note = Seed: VGAGDVGKS (KRAS G13D)
LGAMDSGKL

SEQ ID NO: 83058 - protein, 9 aa, synthetic construct
  source 1..9: note = Seed: VGAGDVGKS (KRAS G13D)
LGAMDSGKM

SEQ ID NO: 83059 - protein, 9 aa, synthetic construct
  source 1..9: note = Seed: VGAGDVGKS (KRAS G13D)
LGAMDSGKS

SEQ ID NO: 83060 - protein, 9 aa, synthetic construct
  source 1..9: note = Seed: VGAGDVGKS (KRAS G13D)
LGAMDSGKT

SEQ ID NO: 83061 - protein, 9 aa, synthetic construct
  source 1..9: note = Seed: VGAGDVGKS (KRAS G13D)
LGAMDSGKV

SEQ ID NO: 83062 - protein, 9 aa, synthetic construct
  source 1..9: note = Seed: VGAGDVGKS (KRAS G13D)
LGAMDTGKA

SEQ ID NO: 83063 - protein, 9 aa, synthetic construct
  source 1..9: note = Seed: VGAGDVGKS (KRAS G13D)
LGAMDTGKI

SEQ ID NO: 83064 - protein, 9 aa, synthetic construct
  source 1..9: note = Seed: VGAGDVGKS (KRAS G13D)
LGAMDTGKL

SEQ ID NO: 83065 - protein, 9 aa, synthetic construct
  source 1..9: note = Seed: VGAGDVGKS (KRAS G13D)
LGAMDTGKV

SEQ ID NO: 83066 - protein, 9 aa, synthetic construct
  source 1..9: note = Seed: VGAGDVGKS (KRAS G13D)
LGAMDVGKA

SEQ ID NO: 83067 - protein, 9 aa, synthetic construct
  source 1..9: note = Seed: VGAGDVGKS (KRAS G13D)
LGAMDVGKV

SEQ ID NO: 83068 - protein, 9 aa, synthetic construct
  source 1..9: note = Seed: VGAGDVGKS (KRAS G13D)
LGANDAGKA

SEQ ID NO: 83069 - protein, 9 aa, synthetic construct
  source 1..9: note = Seed: VGAGDVGKS (KRAS G13D)
LGANDAGKI

SEQ ID NO: 83070 - protein, 9 aa, synthetic construct
  source 1..9: note = Seed: VGAGDVGKS (KRAS G13D)
LGANDAGKL

SEQ ID NO: 83071 - protein, 9 aa, synthetic construct
  source 1..9: note = Seed: VGAGDVGKS (KRAS G13D)
LGANDAGKV

SEQ ID NO: 83072 - protein, 9 aa, synthetic construct
  source 1..9: note = Seed: VGAGDVGKS (KRAS G13D)
LGAQDAGKA

SEQ ID NO: 83073 - protein, 9 aa, synthetic construct
  source 1..9: note = Seed: VGAGDVGKS (KRAS G13D)
LGAQDAGKI

SEQ ID NO: 83074 - protein, 9 aa, synthetic construct
  source 1..9: note = Seed: VGAGDVGKS (KRAS G13D)
LGAQDAGKL

SEQ ID NO: 83075 - protein, 9 aa, synthetic construct
  source 1..9: note = Seed: VGAGDVGKS (KRAS G13D)
LGAQDAGKM

SEQ ID NO: 83076 - protein, 9 aa, synthetic construct
  source 1..9: note = Seed: VGAGDVGKS (KRAS G13D)
LGAQDAGKV

SEQ ID NO: 83077 - protein, 9 aa, synthetic construct
  source 1..9: note = Seed: VGAGDVGKS (KRAS G13D)
LGASDAGKA

SEQ ID NO: 83078 - protein, 9 aa, synthetic construct
  source 1..9: note = Seed: VGAGDVGKS (KRAS G13D)
LGASDAGKI

SEQ ID NO: 83079 - protein, 9 aa, synthetic construct
  source 1..9: note = Seed: VGAGDVGKS (KRAS G13D)
LGASDAGKL

SEQ ID NO: 83080 - protein, 9 aa, synthetic construct
  source 1..9: note = Seed: VGAGDVGKS (KRAS G13D)
LGASDAGKS

SEQ ID NO: 83081 - protein, 9 aa, synthetic construct
  source 1..9: note = Seed: VGAGDVGKS (KRAS G13D)
LGASDAGKV

SEQ ID NO: 83082 - protein, 9 aa, synthetic construct
  source 1..9: note = Seed: VGAGDVGKS (KRAS G13D)
LGAVDAGKA

SEQ ID NO: 83083 - protein, 9 aa, synthetic construct
  source 1..9: note = Seed: VGAGDVGKS (KRAS G13D)
LGAVDAGKI

SEQ ID NO: 83084 - protein, 9 aa, synthetic construct
  source 1..9: note = Seed: VGAGDVGKS (KRAS G13D)
LGAVDAGKL

SEQ ID NO: 83085 - protein, 9 aa, synthetic construct
  source 1..9: note = Seed: VGAGDVGKS (KRAS G13D)
LGAVDAGKV

SEQ ID NO: 83086 - protein, 9 aa, synthetic construct
  source 1..9: note = Seed: VGAGDVGKS (KRAS G13D)
MGAADAGKA

SEQ ID NO: 83087 - protein, 9 aa, synthetic construct
  source 1..9: note = Seed: VGAGDVGKS (KRAS G13D)
MGAADAGKC

SEQ ID NO: 83088 - protein, 9 aa, synthetic construct
  source 1..9: note = Seed: VGAGDVGKS (KRAS G13D)
MGAADAGKF

SEQ ID NO: 83089 - protein, 9 aa, synthetic construct
  source 1..9: note = Seed: VGAGDVGKS (KRAS G13D)
MGAADAGKG

SEQ ID NO: 83090 - protein, 9 aa, synthetic construct
  source 1..9: note = Seed: VGAGDVGKS (KRAS G13D)
MGAADAGKI

SEQ ID NO: 83091 - protein, 9 aa, synthetic construct
  source 1..9: note = Seed: VGAGDVGKS (KRAS G13D)
MGAADAGKL

SEQ ID NO: 83092 - protein, 9 aa, synthetic construct
  source 1..9: note = Seed: VGAGDVGKS (KRAS G13D)
MGAADAGKM

SEQ ID NO: 83093 - protein, 9 aa, synthetic construct
  source 1..9: note = Seed: VGAGDVGKS (KRAS G13D)
MGAADAGKN

SEQ ID NO: 83094 - protein, 9 aa, synthetic construct
  source 1..9: note = Seed: VGAGDVGKS (KRAS G13D)
MGAADAGKS

SEQ ID NO: 83095 - protein, 9 aa, synthetic construct
  source 1..9: note = Seed: VGAGDVGKS (KRAS G13D)
MGAADAGKT

SEQ ID NO: 83096 - protein, 9 aa, synthetic construct
  source 1..9: note = Seed: VGAGDVGKS (KRAS G13D)
MGAADAGKV

SEQ ID NO: 83097 - protein, 9 aa, synthetic construct
  source 1..9: note = Seed: VGAGDVGKS (KRAS G13D)
MGAADAGKY

SEQ ID NO: 83098 - protein, 9 aa, synthetic construct
  source 1..9: note = Seed: VGAGDVGKS (KRAS G13D)
MGAADIGKA

SEQ ID NO: 83099 - protein, 9 aa, synthetic construct
  source 1..9: note = Seed: VGAGDVGKS (KRAS G13D)
MGAADIGKI

SEQ ID NO: 83100 - protein, 9 aa, synthetic construct
  source 1..9: note = Seed: VGAGDVGKS (KRAS G13D)
MGAADIGKS

SEQ ID NO: 83101 - protein, 9 aa, synthetic construct
  source 1..9: note = Seed: VGAGDVGKS (KRAS G13D)
MGAADIGKT

SEQ ID NO: 83102 - protein, 9 aa, synthetic construct
  source 1..9: note = Seed: VGAGDVGKS (KRAS G13D)
MGAADIGKV

SEQ ID NO: 83103 - protein, 9 aa, synthetic construct
  source 1..9: note = Seed: VGAGDVGKS (KRAS G13D)
MGAADLGKA

SEQ ID NO: 83104 - protein, 9 aa, synthetic construct
  source 1..9: note = Seed: VGAGDVGKS (KRAS G13D)
MGAADPGKA

SEQ ID NO: 83105 - protein, 9 aa, synthetic construct
  source 1..9: note = Seed: VGAGDVGKS (KRAS G13D)
MGAADPGKI

SEQ ID NO: 83106 - protein, 9 aa, synthetic construct
  source 1..9: note = Seed: VGAGDVGKS (KRAS G13D)
MGAADPGKS

SEQ ID NO: 83107 - protein, 9 aa, synthetic construct
  source 1..9: note = Seed: VGAGDVGKS (KRAS G13D)
MGAADPGKT

SEQ ID NO: 83108 - protein, 9 aa, synthetic construct
  source 1..9: note = Seed: VGAGDVGKS (KRAS G13D)
MGAADPGKV

SEQ ID NO: 83109 - protein, 9 aa, synthetic construct
  source 1..9: note = Seed: VGAGDVGKS (KRAS G13D)
MGAADSGKS

SEQ ID NO: 83110 - protein, 9 aa, synthetic construct
  source 1..9: note = Seed: VGAGDVGKS (KRAS G13D)
MGAADSGKV

SEQ ID NO: 83111 - protein, 9 aa, synthetic construct
  source 1..9: note = Seed: VGAGDVGKS (KRAS G13D)
MGAADTGKS

SEQ ID NO: 83112 - protein, 9 aa, synthetic construct
  source 1..9: note = Seed: VGAGDVGKS (KRAS G13D)
MGAADVGKA

SEQ ID NO: 83113 - protein, 9 aa, synthetic construct
  source 1..9: note = Seed: VGAGDVGKS (KRAS G13D)
MGAADVGKG

SEQ ID NO: 83114 - protein, 9 aa, synthetic construct
  source 1..9: note = Seed: VGAGDVGKS (KRAS G13D)
MGAADVGKI

SEQ ID NO: 83115 - protein, 9 aa, synthetic construct
  source 1..9: note = Seed: VGAGDVGKS (KRAS G13D)
MGAADVGKL

SEQ ID NO: 83116 - protein, 9 aa, synthetic construct
  source 1..9: note = Seed: VGAGDVGKS (KRAS G13D)
MGAADVGKM

SEQ ID NO: 83117 - protein, 9 aa, synthetic construct
  source 1..9: note = Seed: VGAGDVGKS (KRAS G13D)
MGAADVGKN

SEQ ID NO: 83118 - protein, 9 aa, synthetic construct
  source 1..9: note = Seed: VGAGDVGKS (KRAS G13D)
MGAADVGKS

SEQ ID NO: 83119 - protein, 9 aa, synthetic construct
  source 1..9: note = Seed: VGAGDVGKS (KRAS G13D)
MGAADVGKT

SEQ ID NO: 83120 - protein, 9 aa, synthetic construct
  source 1..9: note = Seed: VGAGDVGKS (KRAS G13D)
MGAADVGKV

SEQ ID NO: 83121 - protein, 9 aa, synthetic construct
  source 1..9: note = Seed: VGAGDVGKS (KRAS G13D)
MGAFDAGKI

SEQ ID NO: 83122 - protein, 9 aa, synthetic construct
  source 1..9: note = Seed: VGAGDVGKS (KRAS G13D)
MGAFDAGKR

SEQ ID NO: 83123 - protein, 9 aa, synthetic construct
  source 1..9: note = Seed: VGAGDVGKS (KRAS G13D)
MGAFDAGKV

SEQ ID NO: 83124 - protein, 9 aa, synthetic construct
  source 1..9: note = Seed: VGAGDVGKS (KRAS G13D)
MGAGDAGKA

SEQ ID NO: 83125 - protein, 9 aa, synthetic construct
  source 1..9: note = Seed: VGAGDVGKS (KRAS G13D)
MGAGDAGKI

SEQ ID NO: 83126 - protein, 9 aa, synthetic construct
  source 1..9: note = Seed: VGAGDVGKS (KRAS G13D)
MGAGDAGKM

SEQ ID NO: 83127 - protein, 9 aa, synthetic construct
  source 1..9: note = Seed: VGAGDVGKS (KRAS G13D)
MGAGDAGKS

SEQ ID NO: 83128 - protein, 9 aa, synthetic construct
  source 1..9: note = Seed: VGAGDVGKS (KRAS G13D)
MGAGDAGKT

SEQ ID NO: 83129 - protein, 9 aa, synthetic construct
  source 1..9: note = Seed: VGAGDVGKS (KRAS G13D)
MGAGDAGKV

SEQ ID NO: 83130 - protein, 9 aa, synthetic construct
  source 1..9: note = Seed: VGAGDVGKS (KRAS G13D)
MGAGDIGKA

SEQ ID NO: 83131 - protein, 9 aa, synthetic construct
  source 1..9: note = Seed: VGAGDVGKS (KRAS G13D)
MGAGDIGKV

SEQ ID NO: 83132 - protein, 9 aa, synthetic construct
  source 1..9: note = Seed: VGAGDVGKS (KRAS G13D)
MGAGDPGKA

SEQ ID NO: 83133 - protein, 9 aa, synthetic construct
  source 1..9: note = Seed: VGAGDVGKS (KRAS G13D)
MGAGDPGKV

SEQ ID NO: 83134 - protein, 9 aa, synthetic construct
  source 1..9: note = Seed: VGAGDVGKS (KRAS G13D)
MGAGDVGKA

SEQ ID NO: 83135 - protein, 9 aa, synthetic construct
  source 1..9: note = Seed: VGAGDVGKS (KRAS G13D)
MGAGDVGKI

SEQ ID NO: 83136 - protein, 9 aa, synthetic construct
  source 1..9: note = Seed: VGAGDVGKS (KRAS G13D)
MGAGDVGKS

SEQ ID NO: 83137 - protein, 9 aa, synthetic construct
  source 1..9: note = Seed: VGAGDVGKS (KRAS G13D)
MGAGDVGKT

SEQ ID NO: 83138 - protein, 9 aa, synthetic construct
  source 1..9: note = Seed: VGAGDVGKS (KRAS G13D)
MGAGDVGKV

SEQ ID NO: 83139 - protein, 9 aa, synthetic construct
  source 1..9: note = Seed: VGAGDVGKS (KRAS G13D)
MGAIDAGKA

SEQ ID NO: 83140 - protein, 9 aa, synthetic construct
  source 1..9: note = Seed: VGAGDVGKS (KRAS G13D)
MGAIDAGKI

SEQ ID NO: 83141 - protein, 9 aa, synthetic construct
  source 1..9: note = Seed: VGAGDVGKS (KRAS G13D)
MGAIDAGKL

SEQ ID NO: 83142 - protein, 9 aa, synthetic construct
  source 1..9: note = Seed: VGAGDVGKS (KRAS G13D)
MGAIDAGKM

SEQ ID NO: 83143 - protein, 9 aa, synthetic construct
  source 1..9: note = Seed: VGAGDVGKS (KRAS G13D)
MGAIDAGKS

SEQ ID NO: 83144 - protein, 9 aa, synthetic construct
  source 1..9: note = Seed: VGAGDVGKS (KRAS G13D)
MGAIDAGKT

SEQ ID NO: 83145 - protein, 9 aa, synthetic construct
  source 1..9: note = Seed: VGAGDVGKS (KRAS G13D)
MGAIDAGKV

SEQ ID NO: 83146 - protein, 9 aa, synthetic construct
  source 1..9: note = Seed: VGAGDVGKS (KRAS G13D)
MGAIDGGKI

SEQ ID NO: 83147 - protein, 9 aa, synthetic construct
  source 1..9: note = Seed: VGAGDVGKS (KRAS G13D)
MGAIDGGKL

SEQ ID NO: 83148 - protein, 9 aa, synthetic construct
  source 1..9: note = Seed: VGAGDVGKS (KRAS G13D)
MGAIDGGKV

SEQ ID NO: 83149 - protein, 9 aa, synthetic construct
  source 1..9: note = Seed: VGAGDVGKS (KRAS G13D)
MGAIDSGKA

SEQ ID NO: 83150 - protein, 9 aa, synthetic construct
  source 1..9: note = Seed: VGAGDVGKS (KRAS G13D)
MGAIDSGKI

SEQ ID NO: 83151 - protein, 9 aa, synthetic construct
  source 1..9: note = Seed: VGAGDVGKS (KRAS G13D)
MGAIDSGKL

SEQ ID NO: 83152 - protein, 9 aa, synthetic construct
  source 1..9: note = Seed: VGAGDVGKS (KRAS G13D)
MGAIDSGKV

SEQ ID NO: 83153 - protein, 9 aa, synthetic construct
  source 1..9: note = Seed: VGAGDVGKS (KRAS G13D)
MGALDAGKA

SEQ ID NO: 83154 - protein, 9 aa, synthetic construct
  source 1..9: note = Seed: VGAGDVGKS (KRAS G13D)
MGALDAGKG

SEQ ID NO: 83155 - protein, 9 aa, synthetic construct
  source 1..9: note = Seed: VGAGDVGKS (KRAS G13D)
MGALDAGKH

SEQ ID NO: 83156 - protein, 9 aa, synthetic construct
  source 1..9: note = Seed: VGAGDVGKS (KRAS G13D)
MGALDAGKI

SEQ ID NO: 83157 - protein, 9 aa, synthetic construct
  source 1..9: note = Seed: VGAGDVGKS (KRAS G13D)
MGALDAGKK

SEQ ID NO: 83158 - protein, 9 aa, synthetic construct
  source 1..9: note = Seed: VGAGDVGKS (KRAS G13D)
MGALDAGKL

SEQ ID NO: 83159 - protein, 9 aa, synthetic construct
  source 1..9: note = Seed: VGAGDVGKS (KRAS G13D)
MGALDAGKM

SEQ ID NO: 83160 - protein, 9 aa, synthetic construct
  source 1..9: note = Seed: VGAGDVGKS (KRAS G13D)
MGALDAGKN

SEQ ID NO: 83161 - protein, 9 aa, synthetic construct
  source 1..9: note = Seed: VGAGDVGKS (KRAS G13D)
MGALDAGKR

SEQ ID NO: 83162 - protein, 9 aa, synthetic construct
  source 1..9: note = Seed: VGAGDVGKS (KRAS G13D)
MGALDAGKS

SEQ ID NO: 83163 - protein, 9 aa, synthetic construct
  source 1..9: note = Seed: VGAGDVGKS (KRAS G13D)
MGALDAGKT

SEQ ID NO: 83164 - protein, 9 aa, synthetic construct
  source 1..9: note = Seed: VGAGDVGKS (KRAS G13D)
MGALDAGKV

SEQ ID NO: 83165 - protein, 9 aa, synthetic construct
  source 1..9: note = Seed: VGAGDVGKS (KRAS G13D)
MGALDGGKA

SEQ ID NO: 83166 - protein, 9 aa, synthetic construct
  source 1..9: note = Seed: VGAGDVGKS (KRAS G13D)
MGALDGGKI

SEQ ID NO: 83167 - protein, 9 aa, synthetic construct
  source 1..9: note = Seed: VGAGDVGKS (KRAS G13D)
MGALDGGKL

SEQ ID NO: 83168 - protein, 9 aa, synthetic construct
  source 1..9: note = Seed: VGAGDVGKS (KRAS G13D)
MGALDGGKM

SEQ ID NO: 83169 - protein, 9 aa, synthetic construct
  source 1..9: note = Seed: VGAGDVGKS (KRAS G13D)
MGALDGGKT

SEQ ID NO: 83170 - protein, 9 aa, synthetic construct
  source 1..9: note = Seed: VGAGDVGKS (KRAS G13D)
MGALDGGKV

SEQ ID NO: 83171 - protein, 9 aa, synthetic construct
  source 1..9: note = Seed: VGAGDVGKS (KRAS G13D)
MGALDNGKL

SEQ ID NO: 83172 - protein, 9 aa, synthetic construct
  source 1..9: note = Seed: VGAGDVGKS (KRAS G13D)
MGALDNGKV

SEQ ID NO: 83173 - protein, 9 aa, synthetic construct
  source 1..9: note = Seed: VGAGDVGKS (KRAS G13D)
MGALDPGKI

SEQ ID NO: 83174 - protein, 9 aa, synthetic construct
  source 1..9: note = Seed: VGAGDVGKS (KRAS G13D)
MGALDPGKL

SEQ ID NO: 83175 - protein, 9 aa, synthetic construct
  source 1..9: note = Seed: VGAGDVGKS (KRAS G13D)
MGALDPGKV

SEQ ID NO: 83176 - protein, 9 aa, synthetic construct
  source 1..9: note = Seed: VGAGDVGKS (KRAS G13D)
MGALDSGKA

SEQ ID NO: 83177 - protein, 9 aa, synthetic construct
  source 1..9: note = Seed: VGAGDVGKS (KRAS G13D)
MGALDSGKI

SEQ ID NO: 83178 - protein, 9 aa, synthetic construct
  source 1..9: note = Seed: VGAGDVGKS (KRAS G13D)
MGALDSGKL

SEQ ID NO: 83179 - protein, 9 aa, synthetic construct
  source 1..9: note = Seed: VGAGDVGKS (KRAS G13D)
MGALDSGKM

SEQ ID NO: 83180 - protein, 9 aa, synthetic construct
  source 1..9: note = Seed: VGAGDVGKS (KRAS G13D)
MGALDSGKS

SEQ ID NO: 83181 - protein, 9 aa, synthetic construct
  source 1..9: note = Seed: VGAGDVGKS (KRAS G13D)
MGALDSGKT

SEQ ID NO: 83182 - protein, 9 aa, synthetic construct
  source 1..9: note = Seed: VGAGDVGKS (KRAS G13D)
MGALDSGKV

SEQ ID NO: 83183 - protein, 9 aa, synthetic construct
  source 1..9: note = Seed: VGAGDVGKS (KRAS G13D)
MGALDTGKA

SEQ ID NO: 83184 - protein, 9 aa, synthetic construct
  source 1..9: note = Seed: VGAGDVGKS (KRAS G13D)
MGALDTGKI

SEQ ID NO: 83185 - protein, 9 aa, synthetic construct
  source 1..9: note = Seed: VGAGDVGKS (KRAS G13D)
MGALDTGKL

SEQ ID NO: 83186 - protein, 9 aa, synthetic construct
  source 1..9: note = Seed: VGAGDVGKS (KRAS G13D)
MGALDTGKV

SEQ ID NO: 83187 - protein, 9 aa, synthetic construct
  source 1..9: note = Seed: VGAGDVGKS (KRAS G13D)
MGALDVGKA

SEQ ID NO: 83188 - protein, 9 aa, synthetic construct
  source 1..9: note = Seed: VGAGDVGKS (KRAS G13D)
MGALDVGKI

SEQ ID NO: 83189 - protein, 9 aa, synthetic construct
  source 1..9: note = Seed: VGAGDVGKS (KRAS G13D)
MGALDVGKV

SEQ ID NO: 83190 - protein, 9 aa, synthetic construct
  source 1..9: note = Seed: VGAGDVGKS (KRAS G13D)
MGAMDAGKA

SEQ ID NO: 83191 - protein, 9 aa, synthetic construct
  source 1..9: note = Seed: VGAGDVGKS (KRAS G13D)
MGAMDAGKI

SEQ ID NO: 83192 - protein, 9 aa, synthetic construct
  source 1..9: note = Seed: VGAGDVGKS (KRAS G13D)
MGAMDAGKL

SEQ ID NO: 83193 - protein, 9 aa, synthetic construct
  source 1..9: note = Seed: VGAGDVGKS (KRAS G13D)
MGAMDAGKM

SEQ ID NO: 83194 - protein, 9 aa, synthetic construct
  source 1..9: note = Seed: VGAGDVGKS (KRAS G13D)
MGAMDAGKS

SEQ ID NO: 83195 - protein, 9 aa, synthetic construct
  source 1..9: note = Seed: VGAGDVGKS (KRAS G13D)
MGAMDAGKT

SEQ ID NO: 83196 - protein, 9 aa, synthetic construct
  source 1..9: note = Seed: VGAGDVGKS (KRAS G13D)
MGAMDAGKV

SEQ ID NO: 83197 - protein, 9 aa, synthetic construct
  source 1..9: note = Seed: VGAGDVGKS (KRAS G13D)
MGAMDGGKA

SEQ ID NO: 83198 - protein, 9 aa, synthetic construct
  source 1..9: note = Seed: VGAGDVGKS (KRAS G13D)
MGAMDGGKI

SEQ ID NO: 83199 - protein, 9 aa, synthetic construct
  source 1..9: note = Seed: VGAGDVGKS (KRAS G13D)
MGAMDGGKL

SEQ ID NO: 83200 - protein, 9 aa, synthetic construct
  source 1..9: note = Seed: VGAGDVGKS (KRAS G13D)
MGAMDGGKM

SEQ ID NO: 83201 - protein, 9 aa, synthetic construct
  source 1..9: note = Seed: VGAGDVGKS (KRAS G13D)
MGAMDGGKV

SEQ ID NO: 83202 - protein, 9 aa, synthetic construct
  source 1..9: note = Seed: VGAGDVGKS (KRAS G13D)
MGAMDPGKI

SEQ ID NO: 83203 - protein, 9 aa, synthetic construct
  source 1..9: note = Seed: VGAGDVGKS (KRAS G13D)
MGAMDPGKL

SEQ ID NO: 83204 - protein, 9 aa, synthetic construct
  source 1..9: note = Seed: VGAGDVGKS (KRAS G13D)
MGAMDPGKV

SEQ ID NO: 83205 - protein, 9 aa, synthetic construct
  source 1..9: note = Seed: VGAGDVGKS (KRAS G13D)
MGAMDSGKA

SEQ ID NO: 83206 - protein, 9 aa, synthetic construct
  source 1..9: note = Seed: VGAGDVGKS (KRAS G13D)
MGAMDSGKI

SEQ ID NO: 83207 - protein, 9 aa, synthetic construct
  source 1..9: note = Seed: VGAGDVGKS (KRAS G13D)
MGAMDSGKL

SEQ ID NO: 83208 - protein, 9 aa, synthetic construct
  source 1..9: note = Seed: VGAGDVGKS (KRAS G13D)
MGAMDSGKM

SEQ ID NO: 83209 - protein, 9 aa, synthetic construct
  source 1..9: note = Seed: VGAGDVGKS (KRAS G13D)
MGAMDSGKV

SEQ ID NO: 83210 - protein, 9 aa, synthetic construct
  source 1..9: note = Seed: VGAGDVGKS (KRAS G13D)
MGAMDTGKL

SEQ ID NO: 83211 - protein, 9 aa, synthetic construct
  source 1..9: note = Seed: VGAGDVGKS (KRAS G13D)
MGAMDTGKV

SEQ ID NO: 83212 - protein, 9 aa, synthetic construct
  source 1..9: note = Seed: VGAGDVGKS (KRAS G13D)
MGAMDVGKA

SEQ ID NO: 83213 - protein, 9 aa, synthetic construct
  source 1..9: note = Seed: VGAGDVGKS (KRAS G13D)
MGANDAGKV

SEQ ID NO: 83214 - protein, 9 aa, synthetic construct
  source 1..9: note = Seed: VGAGDVGKS (KRAS G13D)
MGAQDAGKA

SEQ ID NO: 83215 - protein, 9 aa, synthetic construct
  source 1..9: note = Seed: VGAGDVGKS (KRAS G13D)
MGAQDAGKI

SEQ ID NO: 83216 - protein, 9 aa, synthetic construct
  source 1..9: note = Seed: VGAGDVGKS (KRAS G13D)
MGAQDAGKL

SEQ ID NO: 83217 - protein, 9 aa, synthetic construct
  source 1..9: note = Seed: VGAGDVGKS (KRAS G13D)
MGAQDAGKV

SEQ ID NO: 83218 - protein, 9 aa, synthetic construct
  source 1..9: note = Seed: VGAGDVGKS (KRAS G13D)
MGASDAGKA

SEQ ID NO: 83219 - protein, 9 aa, synthetic construct
  source 1..9: note = Seed: VGAGDVGKS (KRAS G13D)
MGASDAGKI

SEQ ID NO: 83220 - protein, 9 aa, synthetic construct
  source 1..9: note = Seed: VGAGDVGKS (KRAS G13D)
MGASDAGKL

SEQ ID NO: 83221 - protein, 9 aa, synthetic construct
  source 1..9: note = Seed: VGAGDVGKS (KRAS G13D)
MGASDAGKS

SEQ ID NO: 83222 - protein, 9 aa, synthetic construct
  source 1..9: note = Seed: VGAGDVGKS (KRAS G13D)
MGASDAGKT

SEQ ID NO: 83223 - protein, 9 aa, synthetic construct
  source 1..9: note = Seed: VGAGDVGKS (KRAS G13D)
MGASDAGKV

SEQ ID NO: 83224 - protein, 9 aa, synthetic construct
  source 1..9: note = Seed: VGAGDVGKS (KRAS G13D)
MGASDPGKA

SEQ ID NO: 83225 - protein, 9 aa, synthetic construct
  source 1..9: note = Seed: VGAGDVGKS (KRAS G13D)
MGASDVGKA

SEQ ID NO: 83226 - protein, 9 aa, synthetic construct
  source 1..9: note = Seed: VGAGDVGKS (KRAS G13D)
MGAVDAGKA

SEQ ID NO: 83227 - protein, 9 aa, synthetic construct
  source 1..9: note = Seed: VGAGDVGKS (KRAS G13D)
MGAVDAGKI

SEQ ID NO: 83228 - protein, 9 aa, synthetic construct
  source 1..9: note = Seed: VGAGDVGKS (KRAS G13D)
MGAVDAGKL

SEQ ID NO: 83229 - protein, 9 aa, synthetic construct
  source 1..9: note = Seed: VGAGDVGKS (KRAS G13D)
MGAVDAGKV

SEQ ID NO: 83230 - protein, 9 aa, synthetic construct
  source 1..9: note = Seed: VGAGDVGKS (KRAS G13D)
NGAADVGKA

SEQ ID NO: 83231 - protein, 9 aa, synthetic construct
  source 1..9: note = Seed: VGAGDVGKS (KRAS G13D)
PGAADAGKA

SEQ ID NO: 83232 - protein, 9 aa, synthetic construct
  source 1..9: note = Seed: VGAGDVGKS (KRAS G13D)
PGAADAGKG

SEQ ID NO: 83233 - protein, 9 aa, synthetic construct
  source 1..9: note = Seed: VGAGDVGKS (KRAS G13D)
PGAADAGKI

SEQ ID NO: 83234 - protein, 9 aa, synthetic construct
  source 1..9: note = Seed: VGAGDVGKS (KRAS G13D)
PGAADAGKL

SEQ ID NO: 83235 - protein, 9 aa, synthetic construct
  source 1..9: note = Seed: VGAGDVGKS (KRAS G13D)
PGAADAGKM

SEQ ID NO: 83236 - protein, 9 aa, synthetic construct
  source 1..9: note = Seed: VGAGDVGKS (KRAS G13D)
PGAADAGKN

SEQ ID NO: 83237 - protein, 9 aa, synthetic construct
  source 1..9: note = Seed: VGAGDVGKS (KRAS G13D)
PGAADAGKS

SEQ ID NO: 83238 - protein, 9 aa, synthetic construct
  source 1..9: note = Seed: VGAGDVGKS (KRAS G13D)
PGAADAGKT

SEQ ID NO: 83239 - protein, 9 aa, synthetic construct
  source 1..9: note = Seed: VGAGDVGKS (KRAS G13D)
PGAADAGKV

SEQ ID NO: 83240 - protein, 9 aa, synthetic construct
  source 1..9: note = Seed: VGAGDVGKS (KRAS G13D)
PGAADIGKA

SEQ ID NO: 83241 - protein, 9 aa, synthetic construct
  source 1..9: note = Seed: VGAGDVGKS (KRAS G13D)
PGAADIGKI

SEQ ID NO: 83242 - protein, 9 aa, synthetic construct
  source 1..9: note = Seed: VGAGDVGKS (KRAS G13D)
PGAADIGKS

SEQ ID NO: 83243 - protein, 9 aa, synthetic construct
  source 1..9: note = Seed: VGAGDVGKS (KRAS G13D)
PGAADIGKT

SEQ ID NO: 83244 - protein, 9 aa, synthetic construct
  source 1..9: note = Seed: VGAGDVGKS (KRAS G13D)
PGAADIGKV

SEQ ID NO: 83245 - protein, 9 aa, synthetic construct
  source 1..9: note = Seed: VGAGDVGKS (KRAS G13D)
PGAADLGKA

SEQ ID NO: 83246 - protein, 9 aa, synthetic construct
  source 1..9: note = Seed: VGAGDVGKS (KRAS G13D)
PGAADPGKA

SEQ ID NO: 83247 - protein, 9 aa, synthetic construct
  source 1..9: note = Seed: VGAGDVGKS (KRAS G13D)
PGAADPGKI

SEQ ID NO: 83248 - protein, 9 aa, synthetic construct
  source 1..9: note = Seed: VGAGDVGKS (KRAS G13D)
PGAADPGKS

SEQ ID NO: 83249 - protein, 9 aa, synthetic construct
  source 1..9: note = Seed: VGAGDVGKS (KRAS G13D)
PGAADPGKT

SEQ ID NO: 83250 - protein, 9 aa, synthetic construct
  source 1..9: note = Seed: VGAGDVGKS (KRAS G13D)
PGAADPGKV

SEQ ID NO: 83251 - protein, 9 aa, synthetic construct
  source 1..9: note = Seed: VGAGDVGKS (KRAS G13D)
PGAADSGKS

SEQ ID NO: 83252 - protein, 9 aa, synthetic construct
  source 1..9: note = Seed: VGAGDVGKS (KRAS G13D)
PGAADTGKA

SEQ ID NO: 83253 - protein, 9 aa, synthetic construct
  source 1..9: note = Seed: VGAGDVGKS (KRAS G13D)
PGAADTGKV

SEQ ID NO: 83254 - protein, 9 aa, synthetic construct
  source 1..9: note = Seed: VGAGDVGKS (KRAS G13D)
PGAADVGKA

SEQ ID NO: 83255 - protein, 9 aa, synthetic construct
  source 1..9: note = Seed: VGAGDVGKS (KRAS G13D)
PGAADVGKG

SEQ ID NO: 83256 - protein, 9 aa, synthetic construct
  source 1..9: note = Seed: VGAGDVGKS (KRAS G13D)
PGAADVGKI

SEQ ID NO: 83257 - protein, 9 aa, synthetic construct
  source 1..9: note = Seed: VGAGDVGKS (KRAS G13D)
PGAADVGKS

SEQ ID NO: 83258 - protein, 9 aa, synthetic construct
  source 1..9: note = Seed: VGAGDVGKS (KRAS G13D)
PGAADVGKT

SEQ ID NO: 83259 - protein, 9 aa, synthetic construct
  source 1..9: note = Seed: VGAGDVGKS (KRAS G13D)
PGAADVGKV

SEQ ID NO: 83260 - protein, 9 aa, synthetic construct
  source 1..9: note = Seed: VGAGDVGKS (KRAS G13D)
PGAGDAGKA

SEQ ID NO: 83261 - protein, 9 aa, synthetic construct
  source 1..9: note = Seed: VGAGDVGKS (KRAS G13D)
PGAGDAGKI

SEQ ID NO: 83262 - protein, 9 aa, synthetic construct
  source 1..9: note = Seed: VGAGDVGKS (KRAS G13D)
PGAGDAGKS

SEQ ID NO: 83263 - protein, 9 aa, synthetic construct
  source 1..9: note = Seed: VGAGDVGKS (KRAS G13D)
PGAGDAGKT

SEQ ID NO: 83264 - protein, 9 aa, synthetic construct
  source 1..9: note = Seed: VGAGDVGKS (KRAS G13D)
PGAGDAGKV

SEQ ID NO: 83265 - protein, 9 aa, synthetic construct
  source 1..9: note = Seed: VGAGDVGKS (KRAS G13D)
PGAGDIGKA

SEQ ID NO: 83266 - protein, 9 aa, synthetic construct
  source 1..9: note = Seed: VGAGDVGKS (KRAS G13D)
PGAGDIGKS

SEQ ID NO: 83267 - protein, 9 aa, synthetic construct
  source 1..9: note = Seed: VGAGDVGKS (KRAS G13D)
PGAGDPGKA

SEQ ID NO: 83268 - protein, 9 aa, synthetic construct
  source 1..9: note = Seed: VGAGDVGKS (KRAS G13D)
PGAGDPGKS

SEQ ID NO: 83269 - protein, 9 aa, synthetic construct
  source 1..9: note = Seed: VGAGDVGKS (KRAS G13D)
PGAGDPGKV

SEQ ID NO: 83270 - protein, 9 aa, synthetic construct
  source 1..9: note = Seed: VGAGDVGKS (KRAS G13D)
PGAGDVGKA

SEQ ID NO: 83271 - protein, 9 aa, synthetic construct
  source 1..9: note = Seed: VGAGDVGKS (KRAS G13D)
PGAGDVGKI

SEQ ID NO: 83272 - protein, 9 aa, synthetic construct
  source 1..9: note = Seed: VGAGDVGKS (KRAS G13D)
PGAGDVGKS

SEQ ID NO: 83273 - protein, 9 aa, synthetic construct
  source 1..9: note = Seed: VGAGDVGKS (KRAS G13D)
PGAGDVGKT

SEQ ID NO: 83274 - protein, 9 aa, synthetic construct
  source 1..9: note = Seed: VGAGDVGKS (KRAS G13D)
PGAGDVGKV

SEQ ID NO: 83275 - protein, 9 aa, synthetic construct
  source 1..9: note = Seed: VGAGDVGKS (KRAS G13D)
PGASDAGKA

SEQ ID NO: 83276 - protein, 9 aa, synthetic construct
  source 1..9: note = Seed: VGAGDVGKS (KRAS G13D)
PGASDAGKI

SEQ ID NO: 83277 - protein, 9 aa, synthetic construct
  source 1..9: note = Seed: VGAGDVGKS (KRAS G13D)
PGASDAGKS

SEQ ID NO: 83278 - protein, 9 aa, synthetic construct
  source 1..9: note = Seed: VGAGDVGKS (KRAS G13D)
PGASDAGKV

SEQ ID NO: 83279 - protein, 9 aa, synthetic construct
  source 1..9: note = Seed: VGAGDVGKS (KRAS G13D)
PGASDVGKA

SEQ ID NO: 83280 - protein, 9 aa, synthetic construct
  source 1..9: note = Seed: VGAGDVGKS (KRAS G13D)
QGAADAGKS

SEQ ID NO: 83281 - protein, 9 aa, synthetic construct
  source 1..9: note = Seed: VGAGDVGKS (KRAS G13D)
SGAGDAGKA

SEQ ID NO: 83282 - protein, 9 aa, synthetic construct
  source 1..9: note = Seed: VGAGDVGKS (KRAS G13D)
SGAGDAGKV

SEQ ID NO: 83283 - protein, 9 aa, synthetic construct
  source 1..9: note = Seed: VGAGDVGKS (KRAS G13D)
TGAADAGKA

SEQ ID NO: 83284 - protein, 9 aa, synthetic construct
  source 1..9: note = Seed: VGAGDVGKS (KRAS G13D)
TGAADAGKC

SEQ ID NO: 83285 - protein, 9 aa, synthetic construct
  source 1..9: note = Seed: VGAGDVGKS (KRAS G13D)
TGAADAGKS

SEQ ID NO: 83286 - protein, 9 aa, synthetic construct
  source 1..9: note = Seed: VGAGDVGKS (KRAS G13D)
TGAADAGKT

SEQ ID NO: 83287 - protein, 9 aa, synthetic construct
  source 1..9: note = Seed: VGAGDVGKS (KRAS G13D)
TGAADPGKA

SEQ ID NO: 83288 - protein, 9 aa, synthetic construct
  source 1..9: note = Seed: VGAGDVGKS (KRAS G13D)
TGAADVGKA

SEQ ID NO: 83289 - protein, 9 aa, synthetic construct
  source 1..9: note = Seed: VGAGDVGKS (KRAS G13D)
TGAADVGKI

SEQ ID NO: 83290 - protein, 9 aa, synthetic construct
  source 1..9: note = Seed: VGAGDVGKS (KRAS G13D)
TGAADVGKS

SEQ ID NO: 83291 - protein, 9 aa, synthetic construct
  source 1..9: note = Seed: VGAGDVGKS (KRAS G13D)
TGAADVGKT

SEQ ID NO: 83292 - protein, 9 aa, synthetic construct
  source 1..9: note = Seed: VGAGDVGKS (KRAS G13D)
TGAADVGKV

SEQ ID NO: 83293 - protein, 9 aa, synthetic construct
  source 1..9: note = Seed: VGAGDVGKS (KRAS G13D)
TGAGDAGKA

SEQ ID NO: 83294 - protein, 9 aa, synthetic construct
  source 1..9: note = Seed: VGAGDVGKS (KRAS G13D)
TGAGDAGKI

SEQ ID NO: 83295 - protein, 9 aa, synthetic construct
  source 1..9: note = Seed: VGAGDVGKS (KRAS G13D)
TGAGDAGKS

SEQ ID NO: 83296 - protein, 9 aa, synthetic construct
  source 1..9: note = Seed: VGAGDVGKS (KRAS G13D)
TGAGDAGKV

SEQ ID NO: 83297 - protein, 9 aa, synthetic construct
  source 1..9: note = Seed: VGAGDVGKS (KRAS G13D)
TGAGDVGKA

SEQ ID NO: 83298 - protein, 9 aa, synthetic construct
  source 1..9: note = Seed: VGAGDVGKS (KRAS G13D)
TGASDAGKS

SEQ ID NO: 83299 - protein, 9 aa, synthetic construct
  source 1..9: note = Seed: VGAGDVGKS (KRAS G13D)
VGAADAGKA

SEQ ID NO: 83300 - protein, 9 aa, synthetic construct
  source 1..9: note = Seed: VGAGDVGKS (KRAS G13D)
VGAADAGKC

SEQ ID NO: 83301 - protein, 9 aa, synthetic construct
  source 1..9: note = Seed: VGAGDVGKS (KRAS G13D)
VGAADAGKG

SEQ ID NO: 83302 - protein, 9 aa, synthetic construct
  source 1..9: note = Seed: VGAGDVGKS (KRAS G13D)
VGAADAGKI

SEQ ID NO: 83303 - protein, 9 aa, synthetic construct
  source 1..9: note = Seed: VGAGDVGKS (KRAS G13D)
VGAADAGKL

SEQ ID NO: 83304 - protein, 9 aa, synthetic construct
  source 1..9: note = Seed: VGAGDVGKS (KRAS G13D)
VGAADAGKM

SEQ ID NO: 83305 - protein, 9 aa, synthetic construct
  source 1..9: note = Seed: VGAGDVGKS (KRAS G13D)
VGAADAGKN

SEQ ID NO: 83306 - protein, 9 aa, synthetic construct
  source 1..9: note = Seed: VGAGDVGKS (KRAS G13D)
VGAADAGKS

SEQ ID NO: 83307 - protein, 9 aa, synthetic construct
  source 1..9: note = Seed: VGAGDVGKS (KRAS G13D)
VGAADAGKT

SEQ ID NO: 83308 - protein, 9 aa, synthetic construct
  source 1..9: note = Seed: VGAGDVGKS (KRAS G13D)
VGAADAGKV

SEQ ID NO: 83309 - protein, 9 aa, synthetic construct
  source 1..9: note = Seed: VGAGDVGKS (KRAS G13D)
VGAADIGKA

SEQ ID NO: 83310 - protein, 9 aa, synthetic construct
  source 1..9: note = Seed: VGAGDVGKS (KRAS G13D)
VGAADIGKI

SEQ ID NO: 83311 - protein, 9 aa, synthetic construct
  source 1..9: note = Seed: VGAGDVGKS (KRAS G13D)
VGAADIGKS

SEQ ID NO: 83312 - protein, 9 aa, synthetic construct
  source 1..9: note = Seed: VGAGDVGKS (KRAS G13D)
VGAADIGKT

SEQ ID NO: 83313 - protein, 9 aa, synthetic construct
  source 1..9: note = Seed: VGAGDVGKS (KRAS G13D)
VGAADIGKV

SEQ ID NO: 83314 - protein, 9 aa, synthetic construct
  source 1..9: note = Seed: VGAGDVGKS (KRAS G13D)
VGAADLGKA

SEQ ID NO: 83315 - protein, 9 aa, synthetic construct
  source 1..9: note = Seed: VGAGDVGKS (KRAS G13D)
VGAADMGKA

SEQ ID NO: 83316 - protein, 9 aa, synthetic construct
  source 1..9: note = Seed: VGAGDVGKS (KRAS G13D)
VGAADPGKA

SEQ ID NO: 83317 - protein, 9 aa, synthetic construct
  source 1..9: note = Seed: VGAGDVGKS (KRAS G13D)
VGAADPGKI

SEQ ID NO: 83318 - protein, 9 aa, synthetic construct
  source 1..9: note = Seed: VGAGDVGKS (KRAS G13D)
VGAADPGKS

SEQ ID NO: 83319 - protein, 9 aa, synthetic construct
  source 1..9: note = Seed: VGAGDVGKS (KRAS G13D)
VGAADPGKT

SEQ ID NO: 83320 - protein, 9 aa, synthetic construct
  source 1..9: note = Seed: VGAGDVGKS (KRAS G13D)
VGAADPGKV

SEQ ID NO: 83321 - protein, 9 aa, synthetic construct
  source 1..9: note = Seed: VGAGDVGKS (KRAS G13D)
VGAADSGKA

SEQ ID NO: 83322 - protein, 9 aa, synthetic construct
  source 1..9: note = Seed: VGAGDVGKS (KRAS G13D)
VGAADSGKI

SEQ ID NO: 83323 - protein, 9 aa, synthetic construct
  source 1..9: note = Seed: VGAGDVGKS (KRAS G13D)
VGAADSGKS

SEQ ID NO: 83324 - protein, 9 aa, synthetic construct
  source 1..9: note = Seed: VGAGDVGKS (KRAS G13D)
VGAADSGKT

SEQ ID NO: 83325 - protein, 9 aa, synthetic construct
  source 1..9: note = Seed: VGAGDVGKS (KRAS G13D)
VGAADSGKV

SEQ ID NO: 83326 - protein, 9 aa, synthetic construct
  source 1..9: note = Seed: VGAGDVGKS (KRAS G13D)
VGAADTGKA

SEQ ID NO: 83327 - protein, 9 aa, synthetic construct
  source 1..9: note = Seed: VGAGDVGKS (KRAS G13D)
VGAADTGKI

SEQ ID NO: 83328 - protein, 9 aa, synthetic construct
  source 1..9: note = Seed: VGAGDVGKS (KRAS G13D)
VGAADTGKS

SEQ ID NO: 83329 - protein, 9 aa, synthetic construct
  source 1..9: note = Seed: VGAGDVGKS (KRAS G13D)
VGAADTGKV

SEQ ID NO: 83330 - protein, 9 aa, synthetic construct
  source 1..9: note = Seed: VGAGDVGKS (KRAS G13D)
VGAADVGKA

SEQ ID NO: 83331 - protein, 9 aa, synthetic construct
  source 1..9: note = Seed: VGAGDVGKS (KRAS G13D)
VGAADVGKG

SEQ ID NO: 83332 - protein, 9 aa, synthetic construct
  source 1..9: note = Seed: VGAGDVGKS (KRAS G13D)
VGAADVGKI

SEQ ID NO: 83333 - protein, 9 aa, synthetic construct
  source 1..9: note = Seed: VGAGDVGKS (KRAS G13D)
VGAADVGKM

SEQ ID NO: 83334 - protein, 9 aa, synthetic construct
  source 1..9: note = Seed: VGAGDVGKS (KRAS G13D)
VGAADVGKN

SEQ ID NO: 83335 - protein, 9 aa, synthetic construct
  source 1..9: note = Seed: VGAGDVGKS (KRAS G13D)
VGAADVGKS

SEQ ID NO: 83336 - protein, 9 aa, synthetic construct
  source 1..9: note = Seed: VGAGDVGKS (KRAS G13D)
VGAADVGKT

SEQ ID NO: 83337 - protein, 9 aa, synthetic construct
  source 1..9: note = Seed: VGAGDVGKS (KRAS G13D)
VGAADVGKV

SEQ ID NO: 83338 - protein, 9 aa, synthetic construct
  source 1..9: note = Seed: VGAGDVGKS (KRAS G13D)
VGAGDAGKA

SEQ ID NO: 83339 - protein, 9 aa, synthetic construct
  source 1..9: note = Seed: VGAGDVGKS (KRAS G13D)
VGAGDAGKC

SEQ ID NO: 83340 - protein, 9 aa, synthetic construct
  source 1..9: note = Seed: VGAGDVGKS (KRAS G13D)
VGAGDAGKG

SEQ ID NO: 83341 - protein, 9 aa, synthetic construct
  source 1..9: note = Seed: VGAGDVGKS (KRAS G13D)
VGAGDAGKI

SEQ ID NO: 83342 - protein, 9 aa, synthetic construct
  source 1..9: note = Seed: VGAGDVGKS (KRAS G13D)
VGAGDAGKL

SEQ ID NO: 83343 - protein, 9 aa, synthetic construct
  source 1..9: note = Seed: VGAGDVGKS (KRAS G13D)
VGAGDAGKM

SEQ ID NO: 83344 - protein, 9 aa, synthetic construct
  source 1..9: note = Seed: VGAGDVGKS (KRAS G13D)
VGAGDAGKN

SEQ ID NO: 83345 - protein, 9 aa, synthetic construct
  source 1..9: note = Seed: VGAGDVGKS (KRAS G13D)
VGAGDAGKS

SEQ ID NO: 83346 - protein, 9 aa, synthetic construct
  source 1..9: note = Seed: VGAGDVGKS (KRAS G13D)
VGAGDAGKT

SEQ ID NO: 83347 - protein, 9 aa, synthetic construct
  source 1..9: note = Seed: VGAGDVGKS (KRAS G13D)
VGAGDAGKV

SEQ ID NO: 83348 - protein, 9 aa, synthetic construct
  source 1..9: note = Seed: VGAGDVGKS (KRAS G13D)
VGAGDIGKA

SEQ ID NO: 83349 - protein, 9 aa, synthetic construct
  source 1..9: note = Seed: VGAGDVGKS (KRAS G13D)
VGAGDIGKI

SEQ ID NO: 83350 - protein, 9 aa, synthetic construct
  source 1..9: note = Seed: VGAGDVGKS (KRAS G13D)
VGAGDIGKS

SEQ ID NO: 83351 - protein, 9 aa, synthetic construct
  source 1..9: note = Seed: VGAGDVGKS (KRAS G13D)
VGAGDIGKT

SEQ ID NO: 83352 - protein, 9 aa, synthetic construct
  source 1..9: note = Seed: VGAGDVGKS (KRAS G13D)
VGAGDIGKV

SEQ ID NO: 83353 - protein, 9 aa, synthetic construct
  source 1..9: note = Seed: VGAGDVGKS (KRAS G13D)
VGAGDPGKA

SEQ ID NO: 83354 - protein, 9 aa, synthetic construct
  source 1..9: note = Seed: VGAGDVGKS (KRAS G13D)
VGAGDPGKI

SEQ ID NO: 83355 - protein, 9 aa, synthetic construct
  source 1..9: note = Seed: VGAGDVGKS (KRAS G13D)
VGAGDPGKS

SEQ ID NO: 83356 - protein, 9 aa, synthetic construct
  source 1..9: note = Seed: VGAGDVGKS (KRAS G13D)
VGAGDPGKT

SEQ ID NO: 83357 - protein, 9 aa, synthetic construct
  source 1..9: note = Seed: VGAGDVGKS (KRAS G13D)
VGAGDPGKV

SEQ ID NO: 83358 - protein, 9 aa, synthetic construct
  source 1..9: note = Seed: VGAGDVGKS (KRAS G13D)
VGAGDSGKA

SEQ ID NO: 83359 - protein, 9 aa, synthetic construct
  source 1..9: note = Seed: VGAGDVGKS (KRAS G13D)
VGAGDSGKV

SEQ ID NO: 83360 - protein, 9 aa, synthetic construct
  source 1..9: note = Seed: VGAGDVGKS (KRAS G13D)
VGAGDTGKV

SEQ ID NO: 83361 - protein, 9 aa, synthetic construct
  source 1..9: note = Seed: VGAGDVGKS (KRAS G13D)
VGAGDVGKA

SEQ ID NO: 83362 - protein, 9 aa, synthetic construct
  source 1..9: note = Seed: VGAGDVGKS (KRAS G13D)
VGAGDVGKI

SEQ ID NO: 83363 - protein, 9 aa, synthetic construct
  source 1..9: note = Seed: VGAGDVGKS (KRAS G13D)
VGAGDVGKN

SEQ ID NO: 83364 - protein, 9 aa, synthetic construct
  source 1..9: note = Seed: VGAGDVGKS (KRAS G13D)
VGAGDVGKT

SEQ ID NO: 83365 - protein, 9 aa, synthetic construct
  source 1..9: note = Seed: VGAGDVGKS (KRAS G13D)
VGAGDVGKV

SEQ ID NO: 83366 - protein, 9 aa, synthetic construct
  source 1..9: note = Seed: VGAGDVGKS (KRAS G13D)
VGAIDAGKI

SEQ ID NO: 83367 - protein, 9 aa, synthetic construct
  source 1..9: note = Seed: VGAGDVGKS (KRAS G13D)
VGAIDAGKL

SEQ ID NO: 83368 - protein, 9 aa, synthetic construct
  source 1..9: note = Seed: VGAGDVGKS (KRAS G13D)
VGAIDAGKV

SEQ ID NO: 83369 - protein, 9 aa, synthetic construct
  source 1..9: note = Seed: VGAGDVGKS (KRAS G13D)
VGALDAGKA

SEQ ID NO: 83370 - protein, 9 aa, synthetic construct
  source 1..9: note = Seed: VGAGDVGKS (KRAS G13D)
VGALDAGKI

SEQ ID NO: 83371 - protein, 9 aa, synthetic construct
  source 1..9: note = Seed: VGAGDVGKS (KRAS G13D)
VGALDAGKL

SEQ ID NO: 83372 - protein, 9 aa, synthetic construct
  source 1..9: note = Seed: VGAGDVGKS (KRAS G13D)
VGALDAGKM

SEQ ID NO: 83373 - protein, 9 aa, synthetic construct
  source 1..9: note = Seed: VGAGDVGKS (KRAS G13D)
VGALDAGKT

SEQ ID NO: 83374 - protein, 9 aa, synthetic construct
  source 1..9: note = Seed: VGAGDVGKS (KRAS G13D)
VGALDAGKV

SEQ ID NO: 83375 - protein, 9 aa, synthetic construct
  source 1..9: note = Seed: VGAGDVGKS (KRAS G13D)
VGALDGGKA

SEQ ID NO: 83376 - protein, 9 aa, synthetic construct
  source 1..9: note = Seed: VGAGDVGKS (KRAS G13D)
VGALDGGKI

SEQ ID NO: 83377 - protein, 9 aa, synthetic construct
  source 1..9: note = Seed: VGAGDVGKS (KRAS G13D)
VGALDGGKL

SEQ ID NO: 83378 - protein, 9 aa, synthetic construct
  source 1..9: note = Seed: VGAGDVGKS (KRAS G13D)
VGALDGGKM

SEQ ID NO: 83379 - protein, 9 aa, synthetic construct
  source 1..9: note = Seed: VGAGDVGKS (KRAS G13D)
VGALDGGKV

SEQ ID NO: 83380 - protein, 9 aa, synthetic construct
  source 1..9: note = Seed: VGAGDVGKS (KRAS G13D)
VGALDPGKI

SEQ ID NO: 83381 - protein, 9 aa, synthetic construct
  source 1..9: note = Seed: VGAGDVGKS (KRAS G13D)
VGALDPGKL

SEQ ID NO: 83382 - protein, 9 aa, synthetic construct
  source 1..9: note = Seed: VGAGDVGKS (KRAS G13D)
VGALDPGKV

SEQ ID NO: 83383 - protein, 9 aa, synthetic construct
  source 1..9: note = Seed: VGAGDVGKS (KRAS G13D)
VGALDSGKA

SEQ ID NO: 83384 - protein, 9 aa, synthetic construct
  source 1..9: note = Seed: VGAGDVGKS (KRAS G13D)
VGALDSGKI

SEQ ID NO: 83385 - protein, 9 aa, synthetic construct
  source 1..9: note = Seed: VGAGDVGKS (KRAS G13D)
VGALDSGKL

SEQ ID NO: 83386 - protein, 9 aa, synthetic construct
  source 1..9: note = Seed: VGAGDVGKS (KRAS G13D)
VGALDSGKV

SEQ ID NO: 83387 - protein, 9 aa, synthetic construct
  source 1..9: note = Seed: VGAGDVGKS (KRAS G13D)
VGAMDAGKA

SEQ ID NO: 83388 - protein, 9 aa, synthetic construct
  source 1..9: note = Seed: VGAGDVGKS (KRAS G13D)
VGAMDAGKI

SEQ ID NO: 83389 - protein, 9 aa, synthetic construct
  source 1..9: note = Seed: VGAGDVGKS (KRAS G13D)
VGAMDAGKL

SEQ ID NO: 83390 - protein, 9 aa, synthetic construct
  source 1..9: note = Seed: VGAGDVGKS (KRAS G13D)
VGAMDAGKM

SEQ ID NO: 83391 - protein, 9 aa, synthetic construct
  source 1..9: note = Seed: VGAGDVGKS (KRAS G13D)
VGAMDAGKV

SEQ ID NO: 83392 - protein, 9 aa, synthetic construct
  source 1..9: note = Seed: VGAGDVGKS (KRAS G13D)
VGAMDGGKA

SEQ ID NO: 83393 - protein, 9 aa, synthetic construct
  source 1..9: note = Seed: VGAGDVGKS (KRAS G13D)
VGAMDGGKI

SEQ ID NO: 83394 - protein, 9 aa, synthetic construct
  source 1..9: note = Seed: VGAGDVGKS (KRAS G13D)
VGAMDGGKL

SEQ ID NO: 83395 - protein, 9 aa, synthetic construct
  source 1..9: note = Seed: VGAGDVGKS (KRAS G13D)
VGAMDGGKV

SEQ ID NO: 83396 - protein, 9 aa, synthetic construct
  source 1..9: note = Seed: VGAGDVGKS (KRAS G13D)
VGAMDSGKA

SEQ ID NO: 83397 - protein, 9 aa, synthetic construct
  source 1..9: note = Seed: VGAGDVGKS (KRAS G13D)
VGAMDSGKI

SEQ ID NO: 83398 - protein, 9 aa, synthetic construct
  source 1..9: note = Seed: VGAGDVGKS (KRAS G13D)
VGAMDSGKL

SEQ ID NO: 83399 - protein, 9 aa, synthetic construct
  source 1..9: note = Seed: VGAGDVGKS (KRAS G13D)
VGAMDSGKV

SEQ ID NO: 83400 - protein, 9 aa, synthetic construct
  source 1..9: note = Seed: VGAGDVGKS (KRAS G13D)
VGASDAGKA

SEQ ID NO: 83401 - protein, 9 aa, synthetic construct
  source 1..9: note = Seed: VGAGDVGKS (KRAS G13D)
VGASDAGKI

SEQ ID NO: 83402 - protein, 9 aa, synthetic construct
  source 1..9: note = Seed: VGAGDVGKS (KRAS G13D)
VGASDAGKS

SEQ ID NO: 83403 - protein, 9 aa, synthetic construct
  source 1..9: note = Seed: VGAGDVGKS (KRAS G13D)
VGASDAGKT

SEQ ID NO: 83404 - protein, 9 aa, synthetic construct
  source 1..9: note = Seed: VGAGDVGKS (KRAS G13D)
VGASDAGKV

SEQ ID NO: 83405 - protein, 9 aa, synthetic construct
  source 1..9: note = Seed: VGAGDVGKS (KRAS G13D)
VGASDPGKA

SEQ ID NO: 83406 - protein, 9 aa, synthetic construct
  source 1..9: note = Seed: VGAGDVGKS (KRAS G13D)
VGASDPGKV

SEQ ID NO: 83407 - protein, 9 aa, synthetic construct
  source 1..9: note = Seed: VGAGDVGKS (KRAS G13D)
VGASDVGKA

SEQ ID NO: 83408 - protein, 9 aa, synthetic construct
  source 1..9: note = Seed: VGAGDVGKS (KRAS G13D)
VGASDVGKS

SEQ ID NO: 83409 - protein, 9 aa, synthetic construct
  source 1..9: note = Seed: VGAGDVGKS (KRAS G13D)
VGATDAGKS

SEQ ID NO: 83410 - protein, 9 aa, synthetic construct
  source 1..9: note = Seed: VGAGDVGKS (KRAS G13D)
WGAADAGKA

SEQ ID NO: 83411 - protein, 9 aa, synthetic construct
  source 1..9: note = Seed: VGAGDVGKS (KRAS G13D)
WGAADAGKG

SEQ ID NO: 83412 - protein, 9 aa, synthetic construct
  source 1..9: note = Seed: VGAGDVGKS (KRAS G13D)
WGAADAGKI

SEQ ID NO: 83413 - protein, 9 aa, synthetic construct
  source 1..9: note = Seed: VGAGDVGKS (KRAS G13D)
WGAADAGKL

SEQ ID NO: 83414 - protein, 9 aa, synthetic construct
  source 1..9: note = Seed: VGAGDVGKS (KRAS G13D)
WGAADAGKM

SEQ ID NO: 83415 - protein, 9 aa, synthetic construct
  source 1..9: note = Seed: VGAGDVGKS (KRAS G13D)
WGAADAGKS

SEQ ID NO: 83416 - protein, 9 aa, synthetic construct
  source 1..9: note = Seed: VGAGDVGKS (KRAS G13D)
WGAADAGKT

SEQ ID NO: 83417 - protein, 9 aa, synthetic construct
  source 1..9: note = Seed: VGAGDVGKS (KRAS G13D)
WGAADAGKV

SEQ ID NO: 83418 - protein, 9 aa, synthetic construct
  source 1..9: note = Seed: VGAGDVGKS (KRAS G13D)
WGAADIGKA

SEQ ID NO: 83419 - protein, 9 aa, synthetic construct
  source 1..9: note = Seed: VGAGDVGKS (KRAS G13D)
WGAADIGKS

SEQ ID NO: 83420 - protein, 9 aa, synthetic construct
  source 1..9: note = Seed: VGAGDVGKS (KRAS G13D)
WGAADLGKA

SEQ ID NO: 83421 - protein, 9 aa, synthetic construct
  source 1..9: note = Seed: VGAGDVGKS (KRAS G13D)
WGAADMGKA

SEQ ID NO: 83422 - protein, 9 aa, synthetic construct
  source 1..9: note = Seed: VGAGDVGKS (KRAS G13D)
WGAADMGKV

SEQ ID NO: 83423 - protein, 9 aa, synthetic construct
  source 1..9: note = Seed: VGAGDVGKS (KRAS G13D)
WGAADPGKA

SEQ ID NO: 83424 - protein, 9 aa, synthetic construct
  source 1..9: note = Seed: VGAGDVGKS (KRAS G13D)
WGAADPGKV

SEQ ID NO: 83425 - protein, 9 aa, synthetic construct
  source 1..9: note = Seed: VGAGDVGKS (KRAS G13D)
WGAADSGKA

SEQ ID NO: 83426 - protein, 9 aa, synthetic construct
  source 1..9: note = Seed: VGAGDVGKS (KRAS G13D)
WGAADSGKI

SEQ ID NO: 83427 - protein, 9 aa, synthetic construct
  source 1..9: note = Seed: VGAGDVGKS (KRAS G13D)
WGAADSGKL

SEQ ID NO: 83428 - protein, 9 aa, synthetic construct
  source 1..9: note = Seed: VGAGDVGKS (KRAS G13D)
WGAADSGKS

SEQ ID NO: 83429 - protein, 9 aa, synthetic construct
  source 1..9: note = Seed: VGAGDVGKS (KRAS G13D)
WGAADSGKV

SEQ ID NO: 83430 - protein, 9 aa, synthetic construct
  source 1..9: note = Seed: VGAGDVGKS (KRAS G13D)
WGAADTGKA

SEQ ID NO: 83431 - protein, 9 aa, synthetic construct
  source 1..9: note = Seed: VGAGDVGKS (KRAS G13D)
WGAADTGKI

SEQ ID NO: 83432 - protein, 9 aa, synthetic construct
  source 1..9: note = Seed: VGAGDVGKS (KRAS G13D)
WGAADTGKS

SEQ ID NO: 83433 - protein, 9 aa, synthetic construct
  source 1..9: note = Seed: VGAGDVGKS (KRAS G13D)
WGAADTGKV

SEQ ID NO: 83434 - protein, 9 aa, synthetic construct
  source 1..9: note = Seed: VGAGDVGKS (KRAS G13D)
WGAADVGKA

SEQ ID NO: 83435 - protein, 9 aa, synthetic construct
  source 1..9: note = Seed: VGAGDVGKS (KRAS G13D)
WGAADVGKS

SEQ ID NO: 83436 - protein, 9 aa, synthetic construct
  source 1..9: note = Seed: VGAGDVGKS (KRAS G13D)
WGAADVGKT

SEQ ID NO: 83437 - protein, 9 aa, synthetic construct
  source 1..9: note = Seed: VGAGDVGKS (KRAS G13D)
WGAADVGKV

SEQ ID NO: 83438 - protein, 9 aa, synthetic construct
  source 1..9: note = Seed: VGAGDVGKS (KRAS G13D)
WGAFDAGKA

SEQ ID NO: 83439 - protein, 9 aa, synthetic construct
  source 1..9: note = Seed: VGAGDVGKS (KRAS G13D)
WGAGDAGKA

SEQ ID NO: 83440 - protein, 9 aa, synthetic construct
  source 1..9: note = Seed: VGAGDVGKS (KRAS G13D)
WGAGDAGKI

SEQ ID NO: 83441 - protein, 9 aa, synthetic construct
  source 1..9: note = Seed: VGAGDVGKS (KRAS G13D)
WGAGDAGKS

SEQ ID NO: 83442 - protein, 9 aa, synthetic construct
  source 1..9: note = Seed: VGAGDVGKS (KRAS G13D)
WGAGDAGKT

SEQ ID NO: 83443 - protein, 9 aa, synthetic construct
  source 1..9: note = Seed: VGAGDVGKS (KRAS G13D)
WGAGDAGKV

SEQ ID NO: 83444 - protein, 9 aa, synthetic construct
  source 1..9: note = Seed: VGAGDVGKS (KRAS G13D)
WGAGDIGKA

SEQ ID NO: 83445 - protein, 9 aa, synthetic construct
  source 1..9: note = Seed: VGAGDVGKS (KRAS G13D)
WGAGDPGKA

SEQ ID NO: 83446 - protein, 9 aa, synthetic construct
  source 1..9: note = Seed: VGAGDVGKS (KRAS G13D)
WGAGDVGKA

SEQ ID NO: 83447 - protein, 9 aa, synthetic construct
  source 1..9: note = Seed: VGAGDVGKS (KRAS G13D)
WGAGDVGKS

SEQ ID NO: 83448 - protein, 9 aa, synthetic construct
  source 1..9: note = Seed: VGAGDVGKS (KRAS G13D)
WGAGDVGKT

SEQ ID NO: 83449 - protein, 9 aa, synthetic construct
  source 1..9: note = Seed: VGAGDVGKS (KRAS G13D)
WGAGDVGKV

SEQ ID NO: 83450 - protein, 9 aa, synthetic construct
  source 1..9: note = Seed: VGAGDVGKS (KRAS G13D)
WGAIDAGKA

SEQ ID NO: 83451 - protein, 9 aa, synthetic construct
  source 1..9: note = Seed: VGAGDVGKS (KRAS G13D)
WGAIDAGKI

SEQ ID NO: 83452 - protein, 9 aa, synthetic construct
  source 1..9: note = Seed: VGAGDVGKS (KRAS G13D)
WGAIDAGKL

SEQ ID NO: 83453 - protein, 9 aa, synthetic construct
  source 1..9: note = Seed: VGAGDVGKS (KRAS G13D)
WGAIDAGKM

SEQ ID NO: 83454 - protein, 9 aa, synthetic construct
  source 1..9: note = Seed: VGAGDVGKS (KRAS G13D)
WGAIDAGKS

SEQ ID NO: 83455 - protein, 9 aa, synthetic construct
  source 1..9: note = Seed: VGAGDVGKS (KRAS G13D)
WGAIDAGKT

SEQ ID NO: 83456 - protein, 9 aa, synthetic construct
  source 1..9: note = Seed: VGAGDVGKS (KRAS G13D)
WGAIDAGKV

SEQ ID NO: 83457 - protein, 9 aa, synthetic construct
  source 1..9: note = Seed: VGAGDVGKS (KRAS G13D)
WGAIDGGKA

SEQ ID NO: 83458 - protein, 9 aa, synthetic construct
  source 1..9: note = Seed: VGAGDVGKS (KRAS G13D)
WGAIDGGKI

SEQ ID NO: 83459 - protein, 9 aa, synthetic construct
  source 1..9: note = Seed: VGAGDVGKS (KRAS G13D)
WGAIDGGKL

SEQ ID NO: 83460 - protein, 9 aa, synthetic construct
  source 1..9: note = Seed: VGAGDVGKS (KRAS G13D)
WGAIDGGKV

SEQ ID NO: 83461 - protein, 9 aa, synthetic construct
  source 1..9: note = Seed: VGAGDVGKS (KRAS G13D)
WGAIDPGKI

SEQ ID NO: 83462 - protein, 9 aa, synthetic construct
  source 1..9: note = Seed: VGAGDVGKS (KRAS G13D)
WGAIDPGKL

SEQ ID NO: 83463 - protein, 9 aa, synthetic construct
  source 1..9: note = Seed: VGAGDVGKS (KRAS G13D)
WGAIDPGKV

SEQ ID NO: 83464 - protein, 9 aa, synthetic construct
  source 1..9: note = Seed: VGAGDVGKS (KRAS G13D)
WGAIDSGKA

SEQ ID NO: 83465 - protein, 9 aa, synthetic construct
  source 1..9: note = Seed: VGAGDVGKS (KRAS G13D)
WGAIDSGKI

SEQ ID NO: 83466 - protein, 9 aa, synthetic construct
  source 1..9: note = Seed: VGAGDVGKS (KRAS G13D)
WGAIDSGKL

SEQ ID NO: 83467 - protein, 9 aa, synthetic construct
  source 1..9: note = Seed: VGAGDVGKS (KRAS G13D)
WGAIDSGKV

SEQ ID NO: 83468 - protein, 9 aa, synthetic construct
  source 1..9: note = Seed: VGAGDVGKS (KRAS G13D)
WGALDAGKA

SEQ ID NO: 83469 - protein, 9 aa, synthetic construct
  source 1..9: note = Seed: VGAGDVGKS (KRAS G13D)
WGALDAGKI

SEQ ID NO: 83470 - protein, 9 aa, synthetic construct
  source 1..9: note = Seed: VGAGDVGKS (KRAS G13D)
WGALDAGKL

SEQ ID NO: 83471 - protein, 9 aa, synthetic construct
  source 1..9: note = Seed: VGAGDVGKS (KRAS G13D)
WGALDAGKM

SEQ ID NO: 83472 - protein, 9 aa, synthetic construct
  source 1..9: note = Seed: VGAGDVGKS (KRAS G13D)
WGALDAGKS

SEQ ID NO: 83473 - protein, 9 aa, synthetic construct
  source 1..9: note = Seed: VGAGDVGKS (KRAS G13D)
WGALDAGKT

SEQ ID NO: 83474 - protein, 9 aa, synthetic construct
  source 1..9: note = Seed: VGAGDVGKS (KRAS G13D)
WGALDAGKV

SEQ ID NO: 83475 - protein, 9 aa, synthetic construct
  source 1..9: note = Seed: VGAGDVGKS (KRAS G13D)
WGALDGGKA

SEQ ID NO: 83476 - protein, 9 aa, synthetic construct
  source 1..9: note = Seed: VGAGDVGKS (KRAS G13D)
WGALDGGKI

SEQ ID NO: 83477 - protein, 9 aa, synthetic construct
  source 1..9: note = Seed: VGAGDVGKS (KRAS G13D)
WGALDGGKL

SEQ ID NO: 83478 - protein, 9 aa, synthetic construct
  source 1..9: note = Seed: VGAGDVGKS (KRAS G13D)
WGALDGGKM

SEQ ID NO: 83479 - protein, 9 aa, synthetic construct
  source 1..9: note = Seed: VGAGDVGKS (KRAS G13D)
WGALDGGKS

SEQ ID NO: 83480 - protein, 9 aa, synthetic construct
  source 1..9: note = Seed: VGAGDVGKS (KRAS G13D)
WGALDGGKT

SEQ ID NO: 83481 - protein, 9 aa, synthetic construct
  source 1..9: note = Seed: VGAGDVGKS (KRAS G13D)
WGALDGGKV

SEQ ID NO: 83482 - protein, 9 aa, synthetic construct
  source 1..9: note = Seed: VGAGDVGKS (KRAS G13D)
WGALDNGKA

SEQ ID NO: 83483 - protein, 9 aa, synthetic construct
  source 1..9: note = Seed: VGAGDVGKS (KRAS G13D)
WGALDNGKI

SEQ ID NO: 83484 - protein, 9 aa, synthetic construct
  source 1..9: note = Seed: VGAGDVGKS (KRAS G13D)
WGALDNGKL

SEQ ID NO: 83485 - protein, 9 aa, synthetic construct
  source 1..9: note = Seed: VGAGDVGKS (KRAS G13D)
WGALDNGKV

SEQ ID NO: 83486 - protein, 9 aa, synthetic construct
  source 1..9: note = Seed: VGAGDVGKS (KRAS G13D)
WGALDPGKA

SEQ ID NO: 83487 - protein, 9 aa, synthetic construct
  source 1..9: note = Seed: VGAGDVGKS (KRAS G13D)
WGALDPGKI

SEQ ID NO: 83488 - protein, 9 aa, synthetic construct
  source 1..9: note = Seed: VGAGDVGKS (KRAS G13D)
WGALDPGKL

SEQ ID NO: 83489 - protein, 9 aa, synthetic construct
  source 1..9: note = Seed: VGAGDVGKS (KRAS G13D)
WGALDPGKM

SEQ ID NO: 83490 - protein, 9 aa, synthetic construct
  source 1..9: note = Seed: VGAGDVGKS (KRAS G13D)
WGALDPGKT

SEQ ID NO: 83491 - protein, 9 aa, synthetic construct
  source 1..9: note = Seed: VGAGDVGKS (KRAS G13D)
WGALDPGKV

SEQ ID NO: 83492 - protein, 9 aa, synthetic construct
  source 1..9: note = Seed: VGAGDVGKS (KRAS G13D)
WGALDSGKA

SEQ ID NO: 83493 - protein, 9 aa, synthetic construct
  source 1..9: note = Seed: VGAGDVGKS (KRAS G13D)
WGALDSGKI

SEQ ID NO: 83494 - protein, 9 aa, synthetic construct
  source 1..9: note = Seed: VGAGDVGKS (KRAS G13D)
WGALDSGKL

SEQ ID NO: 83495 - protein, 9 aa, synthetic construct
  source 1..9: note = Seed: VGAGDVGKS (KRAS G13D)
WGALDSGKM

SEQ ID NO: 83496 - protein, 9 aa, synthetic construct
  source 1..9: note = Seed: VGAGDVGKS (KRAS G13D)
WGALDSGKS

SEQ ID NO: 83497 - protein, 9 aa, synthetic construct
  source 1..9: note = Seed: VGAGDVGKS (KRAS G13D)
WGALDSGKT

SEQ ID NO: 83498 - protein, 9 aa, synthetic construct
  source 1..9: note = Seed: VGAGDVGKS (KRAS G13D)
WGALDSGKV

SEQ ID NO: 83499 - protein, 9 aa, synthetic construct
  source 1..9: note = Seed: VGAGDVGKS (KRAS G13D)
WGALDTGKA

SEQ ID NO: 83500 - protein, 9 aa, synthetic construct
  source 1..9: note = Seed: VGAGDVGKS (KRAS G13D)
WGALDTGKI

SEQ ID NO: 83501 - protein, 9 aa, synthetic construct
  source 1..9: note = Seed: VGAGDVGKS (KRAS G13D)
WGALDTGKL

SEQ ID NO: 83502 - protein, 9 aa, synthetic construct
  source 1..9: note = Seed: VGAGDVGKS (KRAS G13D)
WGALDTGKM

SEQ ID NO: 83503 - protein, 9 aa, synthetic construct
  source 1..9: note = Seed: VGAGDVGKS (KRAS G13D)
WGALDTGKT

SEQ ID NO: 83504 - protein, 9 aa, synthetic construct
  source 1..9: note = Seed: VGAGDVGKS (KRAS G13D)
WGALDTGKV

SEQ ID NO: 83505 - protein, 9 aa, synthetic construct
  source 1..9: note = Seed: VGAGDVGKS (KRAS G13D)
WGALDVGKA

SEQ ID NO: 83506 - protein, 9 aa, synthetic construct
  source 1..9: note = Seed: VGAGDVGKS (KRAS G13D)
WGALDVGKI

SEQ ID NO: 83507 - protein, 9 aa, synthetic construct
  source 1..9: note = Seed: VGAGDVGKS (KRAS G13D)
WGALDVGKL

SEQ ID NO: 83508 - protein, 9 aa, synthetic construct
  source 1..9: note = Seed: VGAGDVGKS (KRAS G13D)
WGALDVGKV

SEQ ID NO: 83509 - protein, 9 aa, synthetic construct
  source 1..9: note = Seed: VGAGDVGKS (KRAS G13D)
WGAMDAGKA

SEQ ID NO: 83510 - protein, 9 aa, synthetic construct
  source 1..9: note = Seed: VGAGDVGKS (KRAS G13D)
WGAMDAGKI

SEQ ID NO: 83511 - protein, 9 aa, synthetic construct
  source 1..9: note = Seed: VGAGDVGKS (KRAS G13D)
WGAMDAGKL

SEQ ID NO: 83512 - protein, 9 aa, synthetic construct
  source 1..9: note = Seed: VGAGDVGKS (KRAS G13D)
WGAMDAGKM

SEQ ID NO: 83513 - protein, 9 aa, synthetic construct
  source 1..9: note = Seed: VGAGDVGKS (KRAS G13D)
WGAMDAGKS

SEQ ID NO: 83514 - protein, 9 aa, synthetic construct
  source 1..9: note = Seed: VGAGDVGKS (KRAS G13D)
WGAMDAGKT

SEQ ID NO: 83515 - protein, 9 aa, synthetic construct
  source 1..9: note = Seed: VGAGDVGKS (KRAS G13D)
WGAMDAGKV

SEQ ID NO: 83516 - protein, 9 aa, synthetic construct
  source 1..9: note = Seed: VGAGDVGKS (KRAS G13D)
WGAMDGGKA

SEQ ID NO: 83517 - protein, 9 aa, synthetic construct
  source 1..9: note = Seed: VGAGDVGKS (KRAS G13D)
WGAMDGGKI

SEQ ID NO: 83518 - protein, 9 aa, synthetic construct
  source 1..9: note = Seed: VGAGDVGKS (KRAS G13D)
WGAMDGGKL

SEQ ID NO: 83519 - protein, 9 aa, synthetic construct
  source 1..9: note = Seed: VGAGDVGKS (KRAS G13D)
WGAMDGGKM

SEQ ID NO: 83520 - protein, 9 aa, synthetic construct
  source 1..9: note = Seed: VGAGDVGKS (KRAS G13D)
WGAMDGGKS

SEQ ID NO: 83521 - protein, 9 aa, synthetic construct
  source 1..9: note = Seed: VGAGDVGKS (KRAS G13D)
WGAMDGGKT

SEQ ID NO: 83522 - protein, 9 aa, synthetic construct
  source 1..9: note = Seed: VGAGDVGKS (KRAS G13D)
WGAMDGGKV

SEQ ID NO: 83523 - protein, 9 aa, synthetic construct
  source 1..9: note = Seed: VGAGDVGKS (KRAS G13D)
WGAMDNGKA

SEQ ID NO: 83524 - protein, 9 aa, synthetic construct
  source 1..9: note = Seed: VGAGDVGKS (KRAS G13D)
WGAMDNGKI

SEQ ID NO: 83525 - protein, 9 aa, synthetic construct
  source 1..9: note = Seed: VGAGDVGKS (KRAS G13D)
WGAMDNGKL

SEQ ID NO: 83526 - protein, 9 aa, synthetic construct
  source 1..9: note = Seed: VGAGDVGKS (KRAS G13D)
WGAMDNGKV

SEQ ID NO: 83527 - protein, 9 aa, synthetic construct
  source 1..9: note = Seed: VGAGDVGKS (KRAS G13D)
WGAMDPGKA

SEQ ID NO: 83528 - protein, 9 aa, synthetic construct
  source 1..9: note = Seed: VGAGDVGKS (KRAS G13D)
WGAMDPGKI

SEQ ID NO: 83529 - protein, 9 aa, synthetic construct
  source 1..9: note = Seed: VGAGDVGKS (KRAS G13D)
WGAMDPGKL

SEQ ID NO: 83530 - protein, 9 aa, synthetic construct
  source 1..9: note = Seed: VGAGDVGKS (KRAS G13D)
WGAMDPGKM

SEQ ID NO: 83531 - protein, 9 aa, synthetic construct
  source 1..9: note = Seed: VGAGDVGKS (KRAS G13D)
WGAMDPGKV

SEQ ID NO: 83532 - protein, 9 aa, synthetic construct
  source 1..9: note = Seed: VGAGDVGKS (KRAS G13D)
WGAMDSGKA

SEQ ID NO: 83533 - protein, 9 aa, synthetic construct
  source 1..9: note = Seed: VGAGDVGKS (KRAS G13D)
WGAMDSGKI

SEQ ID NO: 83534 - protein, 9 aa, synthetic construct
  source 1..9: note = Seed: VGAGDVGKS (KRAS G13D)
WGAMDSGKL

SEQ ID NO: 83535 - protein, 9 aa, synthetic construct
  source 1..9: note = Seed: VGAGDVGKS (KRAS G13D)
WGAMDSGKM

SEQ ID NO: 83536 - protein, 9 aa, synthetic construct
  source 1..9: note = Seed: VGAGDVGKS (KRAS G13D)
WGAMDSGKS

SEQ ID NO: 83537 - protein, 9 aa, synthetic construct
  source 1..9: note = Seed: VGAGDVGKS (KRAS G13D)
WGAMDSGKT

SEQ ID NO: 83538 - protein, 9 aa, synthetic construct
  source 1..9: note = Seed: VGAGDVGKS (KRAS G13D)
WGAMDSGKV

SEQ ID NO: 83539 - protein, 9 aa, synthetic construct
  source 1..9: note = Seed: VGAGDVGKS (KRAS G13D)
WGAMDTGKA

SEQ ID NO: 83540 - protein, 9 aa, synthetic construct
  source 1..9: note = Seed: VGAGDVGKS (KRAS G13D)
WGAMDTGKI

SEQ ID NO: 83541 - protein, 9 aa, synthetic construct
  source 1..9: note = Seed: VGAGDVGKS (KRAS G13D)
WGAMDTGKL

SEQ ID NO: 83542 - protein, 9 aa, synthetic construct
  source 1..9: note = Seed: VGAGDVGKS (KRAS G13D)
WGAMDTGKV

SEQ ID NO: 83543 - protein, 9 aa, synthetic construct
  source 1..9: note = Seed: VGAGDVGKS (KRAS G13D)
WGAQDAGKI

SEQ ID NO: 83544 - protein, 9 aa, synthetic construct
  source 1..9: note = Seed: VGAGDVGKS (KRAS G13D)
WGAQDAGKL

SEQ ID NO: 83545 - protein, 9 aa, synthetic construct
  source 1..9: note = Seed: VGAGDVGKS (KRAS G13D)
WGAQDAGKV

SEQ ID NO: 83546 - protein, 9 aa, synthetic construct
  source 1..9: note = Seed: VGAGDVGKS (KRAS G13D)
WGASDAGKA

SEQ ID NO: 83547 - protein, 9 aa, synthetic construct
  source 1..9: note = Seed: VGAGDVGKS (KRAS G13D)
WGASDAGKI

SEQ ID NO: 83548 - protein, 9 aa, synthetic construct
  source 1..9: note = Seed: VGAGDVGKS (KRAS G13D)
WGASDAGKS

SEQ ID NO: 83549 - protein, 9 aa, synthetic construct
  source 1..9: note = Seed: VGAGDVGKS (KRAS G13D)
WGASDAGKT

SEQ ID NO: 83550 - protein, 9 aa, synthetic construct
  source 1..9: note = Seed: VGAGDVGKS (KRAS G13D)
WGASDAGKV

SEQ ID NO: 83551 - protein, 9 aa, synthetic construct
  source 1..9: note = Seed: VGAGDVGKS (KRAS G13D)
WGATDAGKA

SEQ ID NO: 83552 - protein, 9 aa, synthetic construct
  source 1..9: note = Seed: VGAGDVGKS (KRAS G13D)
WGAVDAGKA

SEQ ID NO: 83553 - protein, 9 aa, synthetic construct
  source 1..9: note = Seed: VGAGDVGKS (KRAS G13D)
WGAVDAGKI

SEQ ID NO: 83554 - protein, 9 aa, synthetic construct
  source 1..9: note = Seed: VGAGDVGKS (KRAS G13D)
WGAVDAGKL

SEQ ID NO: 83555 - protein, 9 aa, synthetic construct
  source 1..9: note = Seed: VGAGDVGKS (KRAS G13D)
WGAVDAGKV

SEQ ID NO: 83556 - protein, 9 aa, synthetic construct
  source 1..9: note = Seed: VGAGDVGKS (KRAS G13D)
WGAVDGGKL

SEQ ID NO: 83557 - protein, 9 aa, synthetic construct
  source 1..9: note = Seed: VGAGDVGKS (KRAS G13D)
WGAVDGGKV

SEQ ID NO: 83558 - protein, 9 aa, synthetic construct
  source 1..9: note = Seed: VGAGDVGKS (KRAS G13D)
WGAVDVGKA

SEQ ID NO: 83559 - protein, 9 aa, synthetic construct
  source 1..9: note = Seed: VGAGDVGKS (KRAS G13D)
YGAADAGKA

SEQ ID NO: 83560 - protein, 9 aa, synthetic construct
  source 1..9: note = Seed: VGAGDVGKS (KRAS G13D)
YGAADAGKG

SEQ ID NO: 83561 - protein, 9 aa, synthetic construct
  source 1..9: note = Seed: VGAGDVGKS (KRAS G13D)
YGAADAGKI

SEQ ID NO: 83562 - protein, 9 aa, synthetic construct
  source 1..9: note = Seed: VGAGDVGKS (KRAS G13D)
YGAADAGKL

SEQ ID NO: 83563 - protein, 9 aa, synthetic construct
  source 1..9: note = Seed: VGAGDVGKS (KRAS G13D)
YGAADAGKM

SEQ ID NO: 83564 - protein, 9 aa, synthetic construct
  source 1..9: note = Seed: VGAGDVGKS (KRAS G13D)
YGAADAGKS

SEQ ID NO: 83565 - protein, 9 aa, synthetic construct
  source 1..9: note = Seed: VGAGDVGKS (KRAS G13D)
YGAADAGKT

SEQ ID NO: 83566 - protein, 9 aa, synthetic construct
  source 1..9: note = Seed: VGAGDVGKS (KRAS G13D)
YGAADAGKV

SEQ ID NO: 83567 - protein, 9 aa, synthetic construct
  source 1..9: note = Seed: VGAGDVGKS (KRAS G13D)
YGAADGGKA

SEQ ID NO: 83568 - protein, 9 aa, synthetic construct
  source 1..9: note = Seed: VGAGDVGKS (KRAS G13D)
YGAADGGKI

SEQ ID NO: 83569 - protein, 9 aa, synthetic construct
  source 1..9: note = Seed: VGAGDVGKS (KRAS G13D)
YGAADGGKL

SEQ ID NO: 83570 - protein, 9 aa, synthetic construct
  source 1..9: note = Seed: VGAGDVGKS (KRAS G13D)
YGAADGGKM

SEQ ID NO: 83571 - protein, 9 aa, synthetic construct
  source 1..9: note = Seed: VGAGDVGKS (KRAS G13D)
YGAADGGKV

SEQ ID NO: 83572 - protein, 9 aa, synthetic construct
  source 1..9: note = Seed: VGAGDVGKS (KRAS G13D)
YGAADIGKA

SEQ ID NO: 83573 - protein, 9 aa, synthetic construct
  source 1..9: note = Seed: VGAGDVGKS (KRAS G13D)
YGAADIGKS

SEQ ID NO: 83574 - protein, 9 aa, synthetic construct
  source 1..9: note = Seed: VGAGDVGKS (KRAS G13D)
YGAADIGKV

SEQ ID NO: 83575 - protein, 9 aa, synthetic construct
  source 1..9: note = Seed: VGAGDVGKS (KRAS G13D)
YGAADLGKA

SEQ ID NO: 83576 - protein, 9 aa, synthetic construct
  source 1..9: note = Seed: VGAGDVGKS (KRAS G13D)
YGAADMGKA

SEQ ID NO: 83577 - protein, 9 aa, synthetic construct
  source 1..9: note = Seed: VGAGDVGKS (KRAS G13D)
YGAADMGKV

SEQ ID NO: 83578 - protein, 9 aa, synthetic construct
  source 1..9: note = Seed: VGAGDVGKS (KRAS G13D)
YGAADNGKA

SEQ ID NO: 83579 - protein, 9 aa, synthetic construct
  source 1..9: note = Seed: VGAGDVGKS (KRAS G13D)
YGAADNGKI

SEQ ID NO: 83580 - protein, 9 aa, synthetic construct
  source 1..9: note = Seed: VGAGDVGKS (KRAS G13D)
YGAADNGKL

SEQ ID NO: 83581 - protein, 9 aa, synthetic construct
  source 1..9: note = Seed: VGAGDVGKS (KRAS G13D)
YGAADNGKV

SEQ ID NO: 83582 - protein, 9 aa, synthetic construct
  source 1..9: note = Seed: VGAGDVGKS (KRAS G13D)
YGAADPGKA

SEQ ID NO: 83583 - protein, 9 aa, synthetic construct
  source 1..9: note = Seed: VGAGDVGKS (KRAS G13D)
YGAADPGKI

SEQ ID NO: 83584 - protein, 9 aa, synthetic construct
  source 1..9: note = Seed: VGAGDVGKS (KRAS G13D)
YGAADPGKL

SEQ ID NO: 83585 - protein, 9 aa, synthetic construct
  source 1..9: note = Seed: VGAGDVGKS (KRAS G13D)
YGAADPGKM

SEQ ID NO: 83586 - protein, 9 aa, synthetic construct
  source 1..9: note = Seed: VGAGDVGKS (KRAS G13D)
YGAADPGKS

SEQ ID NO: 83587 - protein, 9 aa, synthetic construct
  source 1..9: note = Seed: VGAGDVGKS (KRAS G13D)
YGAADPGKV

SEQ ID NO: 83588 - protein, 9 aa, synthetic construct
  source 1..9: note = Seed: VGAGDVGKS (KRAS G13D)
YGAADSGKA

SEQ ID NO: 83589 - protein, 9 aa, synthetic construct
  source 1..9: note = Seed: VGAGDVGKS (KRAS G13D)
YGAADSGKI

SEQ ID NO: 83590 - protein, 9 aa, synthetic construct
  source 1..9: note = Seed: VGAGDVGKS (KRAS G13D)
YGAADSGKL

SEQ ID NO: 83591 - protein, 9 aa, synthetic construct
  source 1..9: note = Seed: VGAGDVGKS (KRAS G13D)
YGAADSGKM

SEQ ID NO: 83592 - protein, 9 aa, synthetic construct
  source 1..9: note = Seed: VGAGDVGKS (KRAS G13D)
YGAADSGKS

SEQ ID NO: 83593 - protein, 9 aa, synthetic construct
  source 1..9: note = Seed: VGAGDVGKS (KRAS G13D)
YGAADSGKT

SEQ ID NO: 83594 - protein, 9 aa, synthetic construct
  source 1..9: note = Seed: VGAGDVGKS (KRAS G13D)
YGAADSGKV

SEQ ID NO: 83595 - protein, 9 aa, synthetic construct
  source 1..9: note = Seed: VGAGDVGKS (KRAS G13D)
YGAADTGKA

SEQ ID NO: 83596 - protein, 9 aa, synthetic construct
  source 1..9: note = Seed: VGAGDVGKS (KRAS G13D)
YGAADTGKI

SEQ ID NO: 83597 - protein, 9 aa, synthetic construct
  source 1..9: note = Seed: VGAGDVGKS (KRAS G13D)
YGAADTGKL

SEQ ID NO: 83598 - protein, 9 aa, synthetic construct
  source 1..9: note = Seed: VGAGDVGKS (KRAS G13D)
YGAADTGKS

SEQ ID NO: 83599 - protein, 9 aa, synthetic construct
  source 1..9: note = Seed: VGAGDVGKS (KRAS G13D)
YGAADTGKV

SEQ ID NO: 83600 - protein, 9 aa, synthetic construct
  source 1..9: note = Seed: VGAGDVGKS (KRAS G13D)
YGAADVGKA

SEQ ID NO: 83601 - protein, 9 aa, synthetic construct
  source 1..9: note = Seed: VGAGDVGKS (KRAS G13D)
YGAADVGKI

SEQ ID NO: 83602 - protein, 9 aa, synthetic construct
  source 1..9: note = Seed: VGAGDVGKS (KRAS G13D)
YGAADVGKL

SEQ ID NO: 83603 - protein, 9 aa, synthetic construct
  source 1..9: note = Seed: VGAGDVGKS (KRAS G13D)
YGAADVGKS

SEQ ID NO: 83604 - protein, 9 aa, synthetic construct
  source 1..9: note = Seed: VGAGDVGKS (KRAS G13D)
YGAADVGKT

SEQ ID NO: 83605 - protein, 9 aa, synthetic construct
  source 1..9: note = Seed: VGAGDVGKS (KRAS G13D)
YGAADVGKV

SEQ ID NO: 83606 - protein, 9 aa, synthetic construct
  source 1..9: note = Seed: VGAGDVGKS (KRAS G13D)
YGAEDAGKA

SEQ ID NO: 83607 - protein, 9 aa, synthetic construct
  source 1..9: note = Seed: VGAGDVGKS (KRAS G13D)
YGAEDAGKI

SEQ ID NO: 83608 - protein, 9 aa, synthetic construct
  source 1..9: note = Seed: VGAGDVGKS (KRAS G13D)
YGAEDAGKL

SEQ ID NO: 83609 - protein, 9 aa, synthetic construct
  source 1..9: note = Seed: VGAGDVGKS (KRAS G13D)
YGAEDAGKV

SEQ ID NO: 83610 - protein, 9 aa, synthetic construct
  source 1..9: note = Seed: VGAGDVGKS (KRAS G13D)
YGAEDGGKL

SEQ ID NO: 83611 - protein, 9 aa, synthetic construct
  source 1..9: note = Seed: VGAGDVGKS (KRAS G13D)
YGAFDAGKA

SEQ ID NO: 83612 - protein, 9 aa, synthetic construct
  source 1..9: note = Seed: VGAGDVGKS (KRAS G13D)
YGAFDAGKI

SEQ ID NO: 83613 - protein, 9 aa, synthetic construct
  source 1..9: note = Seed: VGAGDVGKS (KRAS G13D)
YGAFDAGKL

SEQ ID NO: 83614 - protein, 9 aa, synthetic construct
  source 1..9: note = Seed: VGAGDVGKS (KRAS G13D)
YGAFDAGKM

SEQ ID NO: 83615 - protein, 9 aa, synthetic construct
  source 1..9: note = Seed: VGAGDVGKS (KRAS G13D)
YGAFDAGKS

SEQ ID NO: 83616 - protein, 9 aa, synthetic construct
  source 1..9: note = Seed: VGAGDVGKS (KRAS G13D)
YGAFDAGKV

SEQ ID NO: 83617 - protein, 9 aa, synthetic construct
  source 1..9: note = Seed: VGAGDVGKS (KRAS G13D)
YGAFDGGKA

SEQ ID NO: 83618 - protein, 9 aa, synthetic construct
  source 1..9: note = Seed: VGAGDVGKS (KRAS G13D)
YGAFDGGKI

SEQ ID NO: 83619 - protein, 9 aa, synthetic construct
  source 1..9: note = Seed: VGAGDVGKS (KRAS G13D)
YGAFDGGKL

SEQ ID NO: 83620 - protein, 9 aa, synthetic construct
  source 1..9: note = Seed: VGAGDVGKS (KRAS G13D)
YGAFDGGKV

SEQ ID NO: 83621 - protein, 9 aa, synthetic construct
  source 1..9: note = Seed: VGAGDVGKS (KRAS G13D)
YGAFDPGKA

SEQ ID NO: 83622 - protein, 9 aa, synthetic construct
  source 1..9: note = Seed: VGAGDVGKS (KRAS G13D)
YGAFDPGKI

SEQ ID NO: 83623 - protein, 9 aa, synthetic construct
  source 1..9: note = Seed: VGAGDVGKS (KRAS G13D)
YGAFDPGKV

SEQ ID NO: 83624 - protein, 9 aa, synthetic construct
  source 1..9: note = Seed: VGAGDVGKS (KRAS G13D)
YGAFDSGKA

SEQ ID NO: 83625 - protein, 9 aa, synthetic construct
  source 1..9: note = Seed: VGAGDVGKS (KRAS G13D)
YGAFDSGKI

SEQ ID NO: 83626 - protein, 9 aa, synthetic construct
  source 1..9: note = Seed: VGAGDVGKS (KRAS G13D)
YGAFDSGKL

SEQ ID NO: 83627 - protein, 9 aa, synthetic construct
  source 1..9: note = Seed: VGAGDVGKS (KRAS G13D)
YGAFDSGKV

SEQ ID NO: 83628 - protein, 9 aa, synthetic construct
  source 1..9: note = Seed: VGAGDVGKS (KRAS G13D)
YGAFDVGKA

SEQ ID NO: 83629 - protein, 9 aa, synthetic construct
  source 1..9: note = Seed: VGAGDVGKS (KRAS G13D)
YGAGDAGKA

SEQ ID NO: 83630 - protein, 9 aa, synthetic construct
  source 1..9: note = Seed: VGAGDVGKS (KRAS G13D)
YGAGDAGKI

SEQ ID NO: 83631 - protein, 9 aa, synthetic construct
  source 1..9: note = Seed: VGAGDVGKS (KRAS G13D)
YGAGDAGKS

SEQ ID NO: 83632 - protein, 9 aa, synthetic construct
  source 1..9: note = Seed: VGAGDVGKS (KRAS G13D)
YGAGDAGKT

SEQ ID NO: 83633 - protein, 9 aa, synthetic construct
  source 1..9: note = Seed: VGAGDVGKS (KRAS G13D)
YGAGDAGKV

SEQ ID NO: 83634 - protein, 9 aa, synthetic construct
  source 1..9: note = Seed: VGAGDVGKS (KRAS G13D)
YGAGDIGKA

SEQ ID NO: 83635 - protein, 9 aa, synthetic construct
  source 1..9: note = Seed: VGAGDVGKS (KRAS G13D)
YGAGDPGKA

SEQ ID NO: 83636 - protein, 9 aa, synthetic construct
  source 1..9: note = Seed: VGAGDVGKS (KRAS G13D)
YGAGDVGKA

SEQ ID NO: 83637 - protein, 9 aa, synthetic construct
  source 1..9: note = Seed: VGAGDVGKS (KRAS G13D)
YGAGDVGKS

SEQ ID NO: 83638 - protein, 9 aa, synthetic construct
  source 1..9: note = Seed: VGAGDVGKS (KRAS G13D)
YGAGDVGKT

SEQ ID NO: 83639 - protein, 9 aa, synthetic construct
  source 1..9: note = Seed: VGAGDVGKS (KRAS G13D)
YGAGDVGKV

SEQ ID NO: 83640 - protein, 9 aa, synthetic construct
  source 1..9: note = Seed: VGAGDVGKS (KRAS G13D)
YGAHDAGKL

SEQ ID NO: 83641 - protein, 9 aa, synthetic construct
  source 1..9: note = Seed: VGAGDVGKS (KRAS G13D)
YGAIDAGKA

SEQ ID NO: 83642 - protein, 9 aa, synthetic construct
  source 1..9: note = Seed: VGAGDVGKS (KRAS G13D)
YGAIDAGKC

SEQ ID NO: 83643 - protein, 9 aa, synthetic construct
  source 1..9: note = Seed: VGAGDVGKS (KRAS G13D)
YGAIDAGKF

SEQ ID NO: 83644 - protein, 9 aa, synthetic construct
  source 1..9: note = Seed: VGAGDVGKS (KRAS G13D)
YGAIDAGKG

SEQ ID NO: 83645 - protein, 9 aa, synthetic construct
  source 1..9: note = Seed: VGAGDVGKS (KRAS G13D)
YGAIDAGKI

SEQ ID NO: 83646 - protein, 9 aa, synthetic construct
  source 1..9: note = Seed: VGAGDVGKS (KRAS G13D)
YGAIDAGKL

SEQ ID NO: 83647 - protein, 9 aa, synthetic construct
  source 1..9: note = Seed: VGAGDVGKS (KRAS G13D)
YGAIDAGKM

SEQ ID NO: 83648 - protein, 9 aa, synthetic construct
  source 1..9: note = Seed: VGAGDVGKS (KRAS G13D)
YGAIDAGKN

SEQ ID NO: 83649 - protein, 9 aa, synthetic construct
  source 1..9: note = Seed: VGAGDVGKS (KRAS G13D)
YGAIDAGKS

SEQ ID NO: 83650 - protein, 9 aa, synthetic construct
  source 1..9: note = Seed: VGAGDVGKS (KRAS G13D)
YGAIDAGKT

SEQ ID NO: 83651 - protein, 9 aa, synthetic construct
  source 1..9: note = Seed: VGAGDVGKS (KRAS G13D)
YGAIDAGKV

SEQ ID NO: 83652 - protein, 9 aa, synthetic construct
  source 1..9: note = Seed: VGAGDVGKS (KRAS G13D)
YGAIDGGKA

SEQ ID NO: 83653 - protein, 9 aa, synthetic construct
  source 1..9: note = Seed: VGAGDVGKS (KRAS G13D)
YGAIDGGKI

SEQ ID NO: 83654 - protein, 9 aa, synthetic construct
  source 1..9: note = Seed: VGAGDVGKS (KRAS G13D)
YGAIDGGKL

SEQ ID NO: 83655 - protein, 9 aa, synthetic construct
  source 1..9: note = Seed: VGAGDVGKS (KRAS G13D)
YGAIDGGKM

SEQ ID NO: 83656 - protein, 9 aa, synthetic construct
  source 1..9: note = Seed: VGAGDVGKS (KRAS G13D)
YGAIDGGKS

SEQ ID NO: 83657 - protein, 9 aa, synthetic construct
  source 1..9: note = Seed: VGAGDVGKS (KRAS G13D)
YGAIDGGKT

SEQ ID NO: 83658 - protein, 9 aa, synthetic construct
  source 1..9: note = Seed: VGAGDVGKS (KRAS G13D)
YGAIDGGKV

SEQ ID NO: 83659 - protein, 9 aa, synthetic construct
  source 1..9: note = Seed: VGAGDVGKS (KRAS G13D)
YGAIDIGKA

SEQ ID NO: 83660 - protein, 9 aa, synthetic construct
  source 1..9: note = Seed: VGAGDVGKS (KRAS G13D)
YGAIDIGKV

SEQ ID NO: 83661 - protein, 9 aa, synthetic construct
  source 1..9: note = Seed: VGAGDVGKS (KRAS G13D)
YGAIDNGKA

SEQ ID NO: 83662 - protein, 9 aa, synthetic construct
  source 1..9: note = Seed: VGAGDVGKS (KRAS G13D)
YGAIDNGKI

SEQ ID NO: 83663 - protein, 9 aa, synthetic construct
  source 1..9: note = Seed: VGAGDVGKS (KRAS G13D)
YGAIDNGKL

SEQ ID NO: 83664 - protein, 9 aa, synthetic construct
  source 1..9: note = Seed: VGAGDVGKS (KRAS G13D)
YGAIDNGKM

SEQ ID NO: 83665 - protein, 9 aa, synthetic construct
  source 1..9: note = Seed: VGAGDVGKS (KRAS G13D)
YGAIDNGKV

SEQ ID NO: 83666 - protein, 9 aa, synthetic construct
  source 1..9: note = Seed: VGAGDVGKS (KRAS G13D)
YGAIDPGKA

SEQ ID NO: 83667 - protein, 9 aa, synthetic construct
  source 1..9: note = Seed: VGAGDVGKS (KRAS G13D)
YGAIDPGKI

SEQ ID NO: 83668 - protein, 9 aa, synthetic construct
  source 1..9: note = Seed: VGAGDVGKS (KRAS G13D)
YGAIDPGKL

SEQ ID NO: 83669 - protein, 9 aa, synthetic construct
  source 1..9: note = Seed: VGAGDVGKS (KRAS G13D)
YGAIDPGKM

SEQ ID NO: 83670 - protein, 9 aa, synthetic construct
  source 1..9: note = Seed: VGAGDVGKS (KRAS G13D)
YGAIDPGKS

SEQ ID NO: 83671 - protein, 9 aa, synthetic construct
  source 1..9: note = Seed: VGAGDVGKS (KRAS G13D)
YGAIDPGKT

SEQ ID NO: 83672 - protein, 9 aa, synthetic construct
  source 1..9: note = Seed: VGAGDVGKS (KRAS G13D)
YGAIDPGKV

SEQ ID NO: 83673 - protein, 9 aa, synthetic construct
  source 1..9: note = Seed: VGAGDVGKS (KRAS G13D)
YGAIDSGKA

SEQ ID NO: 83674 - protein, 9 aa, synthetic construct
  source 1..9: note = Seed: VGAGDVGKS (KRAS G13D)
YGAIDSGKG

SEQ ID NO: 83675 - protein, 9 aa, synthetic construct
  source 1..9: note = Seed: VGAGDVGKS (KRAS G13D)
YGAIDSGKI

SEQ ID NO: 83676 - protein, 9 aa, synthetic construct
  source 1..9: note = Seed: VGAGDVGKS (KRAS G13D)
YGAIDSGKL

SEQ ID NO: 83677 - protein, 9 aa, synthetic construct
  source 1..9: note = Seed: VGAGDVGKS (KRAS G13D)
YGAIDSGKM

SEQ ID NO: 83678 - protein, 9 aa, synthetic construct
  source 1..9: note = Seed: VGAGDVGKS (KRAS G13D)
YGAIDSGKS

SEQ ID NO: 83679 - protein, 9 aa, synthetic construct
  source 1..9: note = Seed: VGAGDVGKS (KRAS G13D)
YGAIDSGKT

SEQ ID NO: 83680 - protein, 9 aa, synthetic construct
  source 1..9: note = Seed: VGAGDVGKS (KRAS G13D)
YGAIDSGKV

SEQ ID NO: 83681 - protein, 9 aa, synthetic construct
  source 1..9: note = Seed: VGAGDVGKS (KRAS G13D)
YGAIDTGKA

SEQ ID NO: 83682 - protein, 9 aa, synthetic construct
  source 1..9: note = Seed: VGAGDVGKS (KRAS G13D)
YGAIDTGKI

SEQ ID NO: 83683 - protein, 9 aa, synthetic construct
  source 1..9: note = Seed: VGAGDVGKS (KRAS G13D)
YGAIDTGKL

SEQ ID NO: 83684 - protein, 9 aa, synthetic construct
  source 1..9: note = Seed: VGAGDVGKS (KRAS G13D)
YGAIDTGKM

SEQ ID NO: 83685 - protein, 9 aa, synthetic construct
  source 1..9: note = Seed: VGAGDVGKS (KRAS G13D)
YGAIDTGKS

SEQ ID NO: 83686 - protein, 9 aa, synthetic construct
  source 1..9: note = Seed: VGAGDVGKS (KRAS G13D)
YGAIDTGKT

SEQ ID NO: 83687 - protein, 9 aa, synthetic construct
  source 1..9: note = Seed: VGAGDVGKS (KRAS G13D)
YGAIDTGKV

SEQ ID NO: 83688 - protein, 9 aa, synthetic construct
  source 1..9: note = Seed: VGAGDVGKS (KRAS G13D)
YGAIDVGKA

SEQ ID NO: 83689 - protein, 9 aa, synthetic construct
  source 1..9: note = Seed: VGAGDVGKS (KRAS G13D)
YGAIDVGKI

SEQ ID NO: 83690 - protein, 9 aa, synthetic construct
  source 1..9: note = Seed: VGAGDVGKS (KRAS G13D)
YGAIDVGKL

SEQ ID NO: 83691 - protein, 9 aa, synthetic construct
  source 1..9: note = Seed: VGAGDVGKS (KRAS G13D)
YGAIDVGKV

SEQ ID NO: 83692 - protein, 9 aa, synthetic construct
  source 1..9: note = Seed: VGAGDVGKS (KRAS G13D)
YGALDAGKA

SEQ ID NO: 83693 - protein, 9 aa, synthetic construct
  source 1..9: note = Seed: VGAGDVGKS (KRAS G13D)
YGALDAGKC

SEQ ID NO: 83694 - protein, 9 aa, synthetic construct
  source 1..9: note = Seed: VGAGDVGKS (KRAS G13D)
YGALDAGKF

SEQ ID NO: 83695 - protein, 9 aa, synthetic construct
  source 1..9: note = Seed: VGAGDVGKS (KRAS G13D)
YGALDAGKG

SEQ ID NO: 83696 - protein, 9 aa, synthetic construct
  source 1..9: note = Seed: VGAGDVGKS (KRAS G13D)
YGALDAGKH

SEQ ID NO: 83697 - protein, 9 aa, synthetic construct
  source 1..9: note = Seed: VGAGDVGKS (KRAS G13D)
YGALDAGKI

SEQ ID NO: 83698 - protein, 9 aa, synthetic construct
  source 1..9: note = Seed: VGAGDVGKS (KRAS G13D)
YGALDAGKL

SEQ ID NO: 83699 - protein, 9 aa, synthetic construct
  source 1..9: note = Seed: VGAGDVGKS (KRAS G13D)
YGALDAGKM

SEQ ID NO: 83700 - protein, 9 aa, synthetic construct
  source 1..9: note = Seed: VGAGDVGKS (KRAS G13D)
YGALDAGKN

SEQ ID NO: 83701 - protein, 9 aa, synthetic construct
  source 1..9: note = Seed: VGAGDVGKS (KRAS G13D)
YGALDAGKP

SEQ ID NO: 83702 - protein, 9 aa, synthetic construct
  source 1..9: note = Seed: VGAGDVGKS (KRAS G13D)
YGALDAGKQ

SEQ ID NO: 83703 - protein, 9 aa, synthetic construct
  source 1..9: note = Seed: VGAGDVGKS (KRAS G13D)
YGALDAGKR

SEQ ID NO: 83704 - protein, 9 aa, synthetic construct
  source 1..9: note = Seed: VGAGDVGKS (KRAS G13D)
YGALDAGKS

SEQ ID NO: 83705 - protein, 9 aa, synthetic construct
  source 1..9: note = Seed: VGAGDVGKS (KRAS G13D)
YGALDAGKT

SEQ ID NO: 83706 - protein, 9 aa, synthetic construct
  source 1..9: note = Seed: VGAGDVGKS (KRAS G13D)
YGALDAGKV

SEQ ID NO: 83707 - protein, 9 aa, synthetic construct
  source 1..9: note = Seed: VGAGDVGKS (KRAS G13D)
YGALDAGKW

SEQ ID NO: 83708 - protein, 9 aa, synthetic construct
  source 1..9: note = Seed: VGAGDVGKS (KRAS G13D)
YGALDAGKY

SEQ ID NO: 83709 - protein, 9 aa, synthetic construct
  source 1..9: note = Seed: VGAGDVGKS (KRAS G13D)
YGALDGGKA

SEQ ID NO: 83710 - protein, 9 aa, synthetic construct
  source 1..9: note = Seed: VGAGDVGKS (KRAS G13D)
YGALDGGKC

SEQ ID NO: 83711 - protein, 9 aa, synthetic construct
  source 1..9: note = Seed: VGAGDVGKS (KRAS G13D)
YGALDGGKF

SEQ ID NO: 83712 - protein, 9 aa, synthetic construct
  source 1..9: note = Seed: VGAGDVGKS (KRAS G13D)
YGALDGGKG

SEQ ID NO: 83713 - protein, 9 aa, synthetic construct
  source 1..9: note = Seed: VGAGDVGKS (KRAS G13D)
YGALDGGKI

SEQ ID NO: 83714 - protein, 9 aa, synthetic construct
  source 1..9: note = Seed: VGAGDVGKS (KRAS G13D)
YGALDGGKL

SEQ ID NO: 83715 - protein, 9 aa, synthetic construct
  source 1..9: note = Seed: VGAGDVGKS (KRAS G13D)
YGALDGGKM

SEQ ID NO: 83716 - protein, 9 aa, synthetic construct
  source 1..9: note = Seed: VGAGDVGKS (KRAS G13D)
YGALDGGKN

SEQ ID NO: 83717 - protein, 9 aa, synthetic construct
  source 1..9: note = Seed: VGAGDVGKS (KRAS G13D)
YGALDGGKP

SEQ ID NO: 83718 - protein, 9 aa, synthetic construct
  source 1..9: note = Seed: VGAGDVGKS (KRAS G13D)
YGALDGGKS

SEQ ID NO: 83719 - protein, 9 aa, synthetic construct
  source 1..9: note = Seed: VGAGDVGKS (KRAS G13D)
YGALDGGKT

SEQ ID NO: 83720 - protein, 9 aa, synthetic construct
  source 1..9: note = Seed: VGAGDVGKS (KRAS G13D)
YGALDGGKV

SEQ ID NO: 83721 - protein, 9 aa, synthetic construct
  source 1..9: note = Seed: VGAGDVGKS (KRAS G13D)
YGALDHGKI

SEQ ID NO: 83722 - protein, 9 aa, synthetic construct
  source 1..9: note = Seed: VGAGDVGKS (KRAS G13D)
YGALDHGKL

SEQ ID NO: 83723 - protein, 9 aa, synthetic construct
  source 1..9: note = Seed: VGAGDVGKS (KRAS G13D)
YGALDHGKV

SEQ ID NO: 83724 - protein, 9 aa, synthetic construct
  source 1..9: note = Seed: VGAGDVGKS (KRAS G13D)
YGALDIGKA

SEQ ID NO: 83725 - protein, 9 aa, synthetic construct
  source 1..9: note = Seed: VGAGDVGKS (KRAS G13D)
YGALDIGKI

SEQ ID NO: 83726 - protein, 9 aa, synthetic construct
  source 1..9: note = Seed: VGAGDVGKS (KRAS G13D)
YGALDIGKL

SEQ ID NO: 83727 - protein, 9 aa, synthetic construct
  source 1..9: note = Seed: VGAGDVGKS (KRAS G13D)
YGALDIGKM

SEQ ID NO: 83728 - protein, 9 aa, synthetic construct
  source 1..9: note = Seed: VGAGDVGKS (KRAS G13D)
YGALDIGKS

SEQ ID NO: 83729 - protein, 9 aa, synthetic construct
  source 1..9: note = Seed: VGAGDVGKS (KRAS G13D)
YGALDIGKT

SEQ ID NO: 83730 - protein, 9 aa, synthetic construct
  source 1..9: note = Seed: VGAGDVGKS (KRAS G13D)
YGALDIGKV

SEQ ID NO: 83731 - protein, 9 aa, synthetic construct
  source 1..9: note = Seed: VGAGDVGKS (KRAS G13D)
YGALDLGKA

SEQ ID NO: 83732 - protein, 9 aa, synthetic construct
  source 1..9: note = Seed: VGAGDVGKS (KRAS G13D)
YGALDMGKA

SEQ ID NO: 83733 - protein, 9 aa, synthetic construct
  source 1..9: note = Seed: VGAGDVGKS (KRAS G13D)
YGALDMGKI

SEQ ID NO: 83734 - protein, 9 aa, synthetic construct
  source 1..9: note = Seed: VGAGDVGKS (KRAS G13D)
YGALDMGKL

SEQ ID NO: 83735 - protein, 9 aa, synthetic construct
  source 1..9: note = Seed: VGAGDVGKS (KRAS G13D)
YGALDMGKV

SEQ ID NO: 83736 - protein, 9 aa, synthetic construct
  source 1..9: note = Seed: VGAGDVGKS (KRAS G13D)
YGALDNGKA

SEQ ID NO: 83737 - protein, 9 aa, synthetic construct
  source 1..9: note = Seed: VGAGDVGKS (KRAS G13D)
YGALDNGKI

SEQ ID NO: 83738 - protein, 9 aa, synthetic construct
  source 1..9: note = Seed: VGAGDVGKS (KRAS G13D)
YGALDNGKL

SEQ ID NO: 83739 - protein, 9 aa, synthetic construct
  source 1..9: note = Seed: VGAGDVGKS (KRAS G13D)
YGALDNGKM

SEQ ID NO: 83740 - protein, 9 aa, synthetic construct
  source 1..9: note = Seed: VGAGDVGKS (KRAS G13D)
YGALDNGKS

SEQ ID NO: 83741 - protein, 9 aa, synthetic construct
  source 1..9: note = Seed: VGAGDVGKS (KRAS G13D)
YGALDNGKT

SEQ ID NO: 83742 - protein, 9 aa, synthetic construct
  source 1..9: note = Seed: VGAGDVGKS (KRAS G13D)
YGALDNGKV

SEQ ID NO: 83743 - protein, 9 aa, synthetic construct
  source 1..9: note = Seed: VGAGDVGKS (KRAS G13D)
YGALDPGKA

SEQ ID NO: 83744 - protein, 9 aa, synthetic construct
  source 1..9: note = Seed: VGAGDVGKS (KRAS G13D)
YGALDPGKF

SEQ ID NO: 83745 - protein, 9 aa, synthetic construct
  source 1..9: note = Seed: VGAGDVGKS (KRAS G13D)
YGALDPGKG

SEQ ID NO: 83746 - protein, 9 aa, synthetic construct
  source 1..9: note = Seed: VGAGDVGKS (KRAS G13D)
YGALDPGKI

SEQ ID NO: 83747 - protein, 9 aa, synthetic construct
  source 1..9: note = Seed: VGAGDVGKS (KRAS G13D)
YGALDPGKL

SEQ ID NO: 83748 - protein, 9 aa, synthetic construct
  source 1..9: note = Seed: VGAGDVGKS (KRAS G13D)
YGALDPGKM

SEQ ID NO: 83749 - protein, 9 aa, synthetic construct
  source 1..9: note = Seed: VGAGDVGKS (KRAS G13D)
YGALDPGKN

SEQ ID NO: 83750 - protein, 9 aa, synthetic construct
  source 1..9: note = Seed: VGAGDVGKS (KRAS G13D)
YGALDPGKS

SEQ ID NO: 83751 - protein, 9 aa, synthetic construct
  source 1..9: note = Seed: VGAGDVGKS (KRAS G13D)
YGALDPGKT

SEQ ID NO: 83752 - protein, 9 aa, synthetic construct
  source 1..9: note = Seed: VGAGDVGKS (KRAS G13D)
YGALDPGKV

SEQ ID NO: 83753 - protein, 9 aa, synthetic construct
  source 1..9: note = Seed: VGAGDVGKS (KRAS G13D)
YGALDSGKA

SEQ ID NO: 83754 - protein, 9 aa, synthetic construct
  source 1..9: note = Seed: VGAGDVGKS (KRAS G13D)
YGALDSGKC

SEQ ID NO: 83755 - protein, 9 aa, synthetic construct
  source 1..9: note = Seed: VGAGDVGKS (KRAS G13D)
YGALDSGKF

SEQ ID NO: 83756 - protein, 9 aa, synthetic construct
  source 1..9: note = Seed: VGAGDVGKS (KRAS G13D)
YGALDSGKG

SEQ ID NO: 83757 - protein, 9 aa, synthetic construct
  source 1..9: note = Seed: VGAGDVGKS (KRAS G13D)
YGALDSGKI

SEQ ID NO: 83758 - protein, 9 aa, synthetic construct
  source 1..9: note = Seed: VGAGDVGKS (KRAS G13D)
YGALDSGKL

SEQ ID NO: 83759 - protein, 9 aa, synthetic construct
  source 1..9: note = Seed: VGAGDVGKS (KRAS G13D)
YGALDSGKM

SEQ ID NO: 83760 - protein, 9 aa, synthetic construct
  source 1..9: note = Seed: VGAGDVGKS (KRAS G13D)
YGALDSGKN

SEQ ID NO: 83761 - protein, 9 aa, synthetic construct
  source 1..9: note = Seed: VGAGDVGKS (KRAS G13D)
YGALDSGKP

SEQ ID NO: 83762 - protein, 9 aa, synthetic construct
  source 1..9: note = Seed: VGAGDVGKS (KRAS G13D)
YGALDSGKS

SEQ ID NO: 83763 - protein, 9 aa, synthetic construct
  source 1..9: note = Seed: VGAGDVGKS (KRAS G13D)
YGALDSGKT

SEQ ID NO: 83764 - protein, 9 aa, synthetic construct
  source 1..9: note = Seed: VGAGDVGKS (KRAS G13D)
YGALDSGKV

SEQ ID NO: 83765 - protein, 9 aa, synthetic construct
  source 1..9: note = Seed: VGAGDVGKS (KRAS G13D)
YGALDTGKA

SEQ ID NO: 83766 - protein, 9 aa, synthetic construct
  source 1..9: note = Seed: VGAGDVGKS (KRAS G13D)
YGALDTGKI

SEQ ID NO: 83767 - protein, 9 aa, synthetic construct
  source 1..9: note = Seed: VGAGDVGKS (KRAS G13D)
YGALDTGKL

SEQ ID NO: 83768 - protein, 9 aa, synthetic construct
  source 1..9: note = Seed: VGAGDVGKS (KRAS G13D)
YGALDTGKM

SEQ ID NO: 83769 - protein, 9 aa, synthetic construct
  source 1..9: note = Seed: VGAGDVGKS (KRAS G13D)
YGALDTGKN

SEQ ID NO: 83770 - protein, 9 aa, synthetic construct
  source 1..9: note = Seed: VGAGDVGKS (KRAS G13D)
YGALDTGKS

SEQ ID NO: 83771 - protein, 9 aa, synthetic construct
  source 1..9: note = Seed: VGAGDVGKS (KRAS G13D)
YGALDTGKT

SEQ ID NO: 83772 - protein, 9 aa, synthetic construct
  source 1..9: note = Seed: VGAGDVGKS (KRAS G13D)
YGALDTGKV

SEQ ID NO: 83773 - protein, 9 aa, synthetic construct
  source 1..9: note = Seed: VGAGDVGKS (KRAS G13D)
YGALDVGKA

SEQ ID NO: 83774 - protein, 9 aa, synthetic construct
  source 1..9: note = Seed: VGAGDVGKS (KRAS G13D)
YGALDVGKI

SEQ ID NO: 83775 - protein, 9 aa, synthetic construct
  source 1..9: note = Seed: VGAGDVGKS (KRAS G13D)
YGALDVGKL

SEQ ID NO: 83776 - protein, 9 aa, synthetic construct
  source 1..9: note = Seed: VGAGDVGKS (KRAS G13D)
YGALDVGKM

SEQ ID NO: 83777 - protein, 9 aa, synthetic construct
  source 1..9: note = Seed: VGAGDVGKS (KRAS G13D)
YGALDVGKN

SEQ ID NO: 83778 - protein, 9 aa, synthetic construct
  source 1..9: note = Seed: VGAGDVGKS (KRAS G13D)
YGALDVGKS

SEQ ID NO: 83779 - protein, 9 aa, synthetic construct
  source 1..9: note = Seed: VGAGDVGKS (KRAS G13D)
YGALDVGKT

SEQ ID NO: 83780 - protein, 9 aa, synthetic construct
  source 1..9: note = Seed: VGAGDVGKS (KRAS G13D)
YGALDVGKV

SEQ ID NO: 83781 - protein, 9 aa, synthetic construct
  source 1..9: note = Seed: VGAGDVGKS (KRAS G13D)
YGAMDAGKA

SEQ ID NO: 83782 - protein, 9 aa, synthetic construct
  source 1..9: note = Seed: VGAGDVGKS (KRAS G13D)
YGAMDAGKC

SEQ ID NO: 83783 - protein, 9 aa, synthetic construct
  source 1..9: note = Seed: VGAGDVGKS (KRAS G13D)
YGAMDAGKF

SEQ ID NO: 83784 - protein, 9 aa, synthetic construct
  source 1..9: note = Seed: VGAGDVGKS (KRAS G13D)
YGAMDAGKG

SEQ ID NO: 83785 - protein, 9 aa, synthetic construct
  source 1..9: note = Seed: VGAGDVGKS (KRAS G13D)
YGAMDAGKH

SEQ ID NO: 83786 - protein, 9 aa, synthetic construct
  source 1..9: note = Seed: VGAGDVGKS (KRAS G13D)
YGAMDAGKI

SEQ ID NO: 83787 - protein, 9 aa, synthetic construct
  source 1..9: note = Seed: VGAGDVGKS (KRAS G13D)
YGAMDAGKL

SEQ ID NO: 83788 - protein, 9 aa, synthetic construct
  source 1..9: note = Seed: VGAGDVGKS (KRAS G13D)
YGAMDAGKM

SEQ ID NO: 83789 - protein, 9 aa, synthetic construct
  source 1..9: note = Seed: VGAGDVGKS (KRAS G13D)
YGAMDAGKN

SEQ ID NO: 83790 - protein, 9 aa, synthetic construct
  source 1..9: note = Seed: VGAGDVGKS (KRAS G13D)
YGAMDAGKP

SEQ ID NO: 83791 - protein, 9 aa, synthetic construct
  source 1..9: note = Seed: VGAGDVGKS (KRAS G13D)
YGAMDAGKQ

SEQ ID NO: 83792 - protein, 9 aa, synthetic construct
  source 1..9: note = Seed: VGAGDVGKS (KRAS G13D)
YGAMDAGKS

SEQ ID NO: 83793 - protein, 9 aa, synthetic construct
  source 1..9: note = Seed: VGAGDVGKS (KRAS G13D)
YGAMDAGKT

SEQ ID NO: 83794 - protein, 9 aa, synthetic construct
  source 1..9: note = Seed: VGAGDVGKS (KRAS G13D)
YGAMDAGKV

SEQ ID NO: 83795 - protein, 9 aa, synthetic construct
  source 1..9: note = Seed: VGAGDVGKS (KRAS G13D)
YGAMDAGKY

SEQ ID NO: 83796 - protein, 9 aa, synthetic construct
  source 1..9: note = Seed: VGAGDVGKS (KRAS G13D)
YGAMDGGKA

SEQ ID NO: 83797 - protein, 9 aa, synthetic construct
  source 1..9: note = Seed: VGAGDVGKS (KRAS G13D)
YGAMDGGKF

SEQ ID NO: 83798 - protein, 9 aa, synthetic construct
  source 1..9: note = Seed: VGAGDVGKS (KRAS G13D)
YGAMDGGKG

SEQ ID NO: 83799 - protein, 9 aa, synthetic construct
  source 1..9: note = Seed: VGAGDVGKS (KRAS G13D)
YGAMDGGKI

SEQ ID NO: 83800 - protein, 9 aa, synthetic construct
  source 1..9: note = Seed: VGAGDVGKS (KRAS G13D)
YGAMDGGKL

SEQ ID NO: 83801 - protein, 9 aa, synthetic construct
  source 1..9: note = Seed: VGAGDVGKS (KRAS G13D)
YGAMDGGKM

SEQ ID NO: 83802 - protein, 9 aa, synthetic construct
  source 1..9: note = Seed: VGAGDVGKS (KRAS G13D)
YGAMDGGKN

SEQ ID NO: 83803 - protein, 9 aa, synthetic construct
  source 1..9: note = Seed: VGAGDVGKS (KRAS G13D)
YGAMDGGKS

SEQ ID NO: 83804 - protein, 9 aa, synthetic construct
  source 1..9: note = Seed: VGAGDVGKS (KRAS G13D)
YGAMDGGKT

SEQ ID NO: 83805 - protein, 9 aa, synthetic construct
  source 1..9: note = Seed: VGAGDVGKS (KRAS G13D)
YGAMDGGKV

SEQ ID NO: 83806 - protein, 9 aa, synthetic construct
  source 1..9: note = Seed: VGAGDVGKS (KRAS G13D)
YGAMDHGKI

SEQ ID NO: 83807 - protein, 9 aa, synthetic construct
  source 1..9: note = Seed: VGAGDVGKS (KRAS G13D)
YGAMDHGKL

SEQ ID NO: 83808 - protein, 9 aa, synthetic construct
  source 1..9: note = Seed: VGAGDVGKS (KRAS G13D)
YGAMDHGKV

SEQ ID NO: 83809 - protein, 9 aa, synthetic construct
  source 1..9: note = Seed: VGAGDVGKS (KRAS G13D)
YGAMDIGKA

SEQ ID NO: 83810 - protein, 9 aa, synthetic construct
  source 1..9: note = Seed: VGAGDVGKS (KRAS G13D)
YGAMDIGKI

SEQ ID NO: 83811 - protein, 9 aa, synthetic construct
  source 1..9: note = Seed: VGAGDVGKS (KRAS G13D)
YGAMDIGKL

SEQ ID NO: 83812 - protein, 9 aa, synthetic construct
  source 1..9: note = Seed: VGAGDVGKS (KRAS G13D)
YGAMDIGKM

SEQ ID NO: 83813 - protein, 9 aa, synthetic construct
  source 1..9: note = Seed: VGAGDVGKS (KRAS G13D)
YGAMDIGKV

SEQ ID NO: 83814 - protein, 9 aa, synthetic construct
  source 1..9: note = Seed: VGAGDVGKS (KRAS G13D)
YGAMDMGKA

SEQ ID NO: 83815 - protein, 9 aa, synthetic construct
  source 1..9: note = Seed: VGAGDVGKS (KRAS G13D)
YGAMDMGKI

SEQ ID NO: 83816 - protein, 9 aa, synthetic construct
  source 1..9: note = Seed: VGAGDVGKS (KRAS G13D)
YGAMDMGKL

SEQ ID NO: 83817 - protein, 9 aa, synthetic construct
  source 1..9: note = Seed: VGAGDVGKS (KRAS G13D)
YGAMDMGKV

SEQ ID NO: 83818 - protein, 9 aa, synthetic construct
  source 1..9: note = Seed: VGAGDVGKS (KRAS G13D)
YGAMDNGKA

SEQ ID NO: 83819 - protein, 9 aa, synthetic construct
  source 1..9: note = Seed: VGAGDVGKS (KRAS G13D)
YGAMDNGKI

SEQ ID NO: 83820 - protein, 9 aa, synthetic construct
  source 1..9: note = Seed: VGAGDVGKS (KRAS G13D)
YGAMDNGKL

SEQ ID NO: 83821 - protein, 9 aa, synthetic construct
  source 1..9: note = Seed: VGAGDVGKS (KRAS G13D)
YGAMDNGKM

SEQ ID NO: 83822 - protein, 9 aa, synthetic construct
  source 1..9: note = Seed: VGAGDVGKS (KRAS G13D)
YGAMDNGKS

SEQ ID NO: 83823 - protein, 9 aa, synthetic construct
  source 1..9: note = Seed: VGAGDVGKS (KRAS G13D)
YGAMDNGKT

SEQ ID NO: 83824 - protein, 9 aa, synthetic construct
  source 1..9: note = Seed: VGAGDVGKS (KRAS G13D)
YGAMDNGKV

SEQ ID NO: 83825 - protein, 9 aa, synthetic construct
  source 1..9: note = Seed: VGAGDVGKS (KRAS G13D)
YGAMDPGKA

SEQ ID NO: 83826 - protein, 9 aa, synthetic construct
  source 1..9: note = Seed: VGAGDVGKS (KRAS G13D)
YGAMDPGKI

SEQ ID NO: 83827 - protein, 9 aa, synthetic construct
  source 1..9: note = Seed: VGAGDVGKS (KRAS G13D)
YGAMDPGKL

SEQ ID NO: 83828 - protein, 9 aa, synthetic construct
  source 1..9: note = Seed: VGAGDVGKS (KRAS G13D)
YGAMDPGKM

SEQ ID NO: 83829 - protein, 9 aa, synthetic construct
  source 1..9: note = Seed: VGAGDVGKS (KRAS G13D)
YGAMDPGKS

SEQ ID NO: 83830 - protein, 9 aa, synthetic construct
  source 1..9: note = Seed: VGAGDVGKS (KRAS G13D)
YGAMDPGKT

SEQ ID NO: 83831 - protein, 9 aa, synthetic construct
  source 1..9: note = Seed: VGAGDVGKS (KRAS G13D)
YGAMDPGKV

SEQ ID NO: 83832 - protein, 9 aa, synthetic construct
  source 1..9: note = Seed: VGAGDVGKS (KRAS G13D)
YGAMDSGKA

SEQ ID NO: 83833 - protein, 9 aa, synthetic construct
  source 1..9: note = Seed: VGAGDVGKS (KRAS G13D)
YGAMDSGKC

SEQ ID NO: 83834 - protein, 9 aa, synthetic construct
  source 1..9: note = Seed: VGAGDVGKS (KRAS G13D)
YGAMDSGKF

SEQ ID NO: 83835 - protein, 9 aa, synthetic construct
  source 1..9: note = Seed: VGAGDVGKS (KRAS G13D)
YGAMDSGKG

SEQ ID NO: 83836 - protein, 9 aa, synthetic construct
  source 1..9: note = Seed: VGAGDVGKS (KRAS G13D)
YGAMDSGKI

SEQ ID NO: 83837 - protein, 9 aa, synthetic construct
  source 1..9: note = Seed: VGAGDVGKS (KRAS G13D)
YGAMDSGKL

SEQ ID NO: 83838 - protein, 9 aa, synthetic construct
  source 1..9: note = Seed: VGAGDVGKS (KRAS G13D)
YGAMDSGKM

SEQ ID NO: 83839 - protein, 9 aa, synthetic construct
  source 1..9: note = Seed: VGAGDVGKS (KRAS G13D)
YGAMDSGKN

SEQ ID NO: 83840 - protein, 9 aa, synthetic construct
  source 1..9: note = Seed: VGAGDVGKS (KRAS G13D)
YGAMDSGKS

SEQ ID NO: 83841 - protein, 9 aa, synthetic construct
  source 1..9: note = Seed: VGAGDVGKS (KRAS G13D)
YGAMDSGKT

SEQ ID NO: 83842 - protein, 9 aa, synthetic construct
  source 1..9: note = Seed: VGAGDVGKS (KRAS G13D)
YGAMDSGKV

SEQ ID NO: 83843 - protein, 9 aa, synthetic construct
  source 1..9: note = Seed: VGAGDVGKS (KRAS G13D)
YGAMDTGKA

SEQ ID NO: 83844 - protein, 9 aa, synthetic construct
  source 1..9: note = Seed: VGAGDVGKS (KRAS G13D)
YGAMDTGKI

SEQ ID NO: 83845 - protein, 9 aa, synthetic construct
  source 1..9: note = Seed: VGAGDVGKS (KRAS G13D)
YGAMDTGKL

SEQ ID NO: 83846 - protein, 9 aa, synthetic construct
  source 1..9: note = Seed: VGAGDVGKS (KRAS G13D)
YGAMDTGKM

SEQ ID NO: 83847 - protein, 9 aa, synthetic construct
  source 1..9: note = Seed: VGAGDVGKS (KRAS G13D)
YGAMDTGKS

SEQ ID NO: 83848 - protein, 9 aa, synthetic construct
  source 1..9: note = Seed: VGAGDVGKS (KRAS G13D)
YGAMDTGKT

SEQ ID NO: 83849 - protein, 9 aa, synthetic construct
  source 1..9: note = Seed: VGAGDVGKS (KRAS G13D)
YGAMDTGKV

SEQ ID NO: 83850 - protein, 9 aa, synthetic construct
  source 1..9: note = Seed: VGAGDVGKS (KRAS G13D)
YGAMDVGKA

SEQ ID NO: 83851 - protein, 9 aa, synthetic construct
  source 1..9: note = Seed: VGAGDVGKS (KRAS G13D)
YGAMDVGKI

SEQ ID NO: 83852 - protein, 9 aa, synthetic construct
  source 1..9: note = Seed: VGAGDVGKS (KRAS G13D)
YGAMDVGKL

SEQ ID NO: 83853 - protein, 9 aa, synthetic construct
  source 1..9: note = Seed: VGAGDVGKS (KRAS G13D)
YGAMDVGKM

SEQ ID NO: 83854 - protein, 9 aa, synthetic construct
  source 1..9: note = Seed: VGAGDVGKS (KRAS G13D)
YGAMDVGKS

SEQ ID NO: 83855 - protein, 9 aa, synthetic construct
  source 1..9: note = Seed: VGAGDVGKS (KRAS G13D)
YGAMDVGKT

SEQ ID NO: 83856 - protein, 9 aa, synthetic construct
  source 1..9: note = Seed: VGAGDVGKS (KRAS G13D)
YGAMDVGKV

SEQ ID NO: 83857 - protein, 9 aa, synthetic construct
  source 1..9: note = Seed: VGAGDVGKS (KRAS G13D)
YGAQDAGKA

SEQ ID NO: 83858 - protein, 9 aa, synthetic construct
  source 1..9: note = Seed: VGAGDVGKS (KRAS G13D)
YGAQDAGKI

SEQ ID NO: 83859 - protein, 9 aa, synthetic construct
  source 1..9: note = Seed: VGAGDVGKS (KRAS G13D)
YGAQDAGKL

SEQ ID NO: 83860 - protein, 9 aa, synthetic construct
  source 1..9: note = Seed: VGAGDVGKS (KRAS G13D)
YGAQDAGKM

SEQ ID NO: 83861 - protein, 9 aa, synthetic construct
  source 1..9: note = Seed: VGAGDVGKS (KRAS G13D)
YGAQDAGKS

SEQ ID NO: 83862 - protein, 9 aa, synthetic construct
  source 1..9: note = Seed: VGAGDVGKS (KRAS G13D)
YGAQDAGKT

SEQ ID NO: 83863 - protein, 9 aa, synthetic construct
  source 1..9: note = Seed: VGAGDVGKS (KRAS G13D)
YGAQDAGKV

SEQ ID NO: 83864 - protein, 9 aa, synthetic construct
  source 1..9: note = Seed: VGAGDVGKS (KRAS G13D)
YGAQDGGKA

SEQ ID NO: 83865 - protein, 9 aa, synthetic construct
  source 1..9: note = Seed: VGAGDVGKS (KRAS G13D)
YGAQDGGKI

SEQ ID NO: 83866 - protein, 9 aa, synthetic construct
  source 1..9: note = Seed: VGAGDVGKS (KRAS G13D)
YGAQDGGKL

SEQ ID NO: 83867 - protein, 9 aa, synthetic construct
  source 1..9: note = Seed: VGAGDVGKS (KRAS G13D)
YGAQDGGKM

SEQ ID NO: 83868 - protein, 9 aa, synthetic construct
  source 1..9: note = Seed: VGAGDVGKS (KRAS G13D)
YGAQDGGKV

SEQ ID NO: 83869 - protein, 9 aa, synthetic construct
  source 1..9: note = Seed: VGAGDVGKS (KRAS G13D)
YGAQDNGKL

SEQ ID NO: 83870 - protein, 9 aa, synthetic construct
  source 1..9: note = Seed: VGAGDVGKS (KRAS G13D)
YGAQDPGKI

SEQ ID NO: 83871 - protein, 9 aa, synthetic construct
  source 1..9: note = Seed: VGAGDVGKS (KRAS G13D)
YGAQDPGKL

SEQ ID NO: 83872 - protein, 9 aa, synthetic construct
  source 1..9: note = Seed: VGAGDVGKS (KRAS G13D)
YGAQDPGKV

SEQ ID NO: 83873 - protein, 9 aa, synthetic construct
  source 1..9: note = Seed: VGAGDVGKS (KRAS G13D)
YGAQDSGKA

SEQ ID NO: 83874 - protein, 9 aa, synthetic construct
  source 1..9: note = Seed: VGAGDVGKS (KRAS G13D)
YGAQDSGKI

SEQ ID NO: 83875 - protein, 9 aa, synthetic construct
  source 1..9: note = Seed: VGAGDVGKS (KRAS G13D)
YGAQDSGKL

SEQ ID NO: 83876 - protein, 9 aa, synthetic construct
  source 1..9: note = Seed: VGAGDVGKS (KRAS G13D)
YGAQDSGKM

SEQ ID NO: 83877 - protein, 9 aa, synthetic construct
  source 1..9: note = Seed: VGAGDVGKS (KRAS G13D)
YGAQDSGKV

SEQ ID NO: 83878 - protein, 9 aa, synthetic construct
  source 1..9: note = Seed: VGAGDVGKS (KRAS G13D)
YGAQDTGKL

SEQ ID NO: 83879 - protein, 9 aa, synthetic construct
  source 1..9: note = Seed: VGAGDVGKS (KRAS G13D)
YGAQDTGKV

SEQ ID NO: 83880 - protein, 9 aa, synthetic construct
  source 1..9: note = Seed: VGAGDVGKS (KRAS G13D)
YGASDAGKA

SEQ ID NO: 83881 - protein, 9 aa, synthetic construct
  source 1..9: note = Seed: VGAGDVGKS (KRAS G13D)
YGASDAGKI

SEQ ID NO: 83882 - protein, 9 aa, synthetic construct
  source 1..9: note = Seed: VGAGDVGKS (KRAS G13D)
YGASDAGKL

SEQ ID NO: 83883 - protein, 9 aa, synthetic construct
  source 1..9: note = Seed: VGAGDVGKS (KRAS G13D)
YGASDAGKM

SEQ ID NO: 83884 - protein, 9 aa, synthetic construct
  source 1..9: note = Seed: VGAGDVGKS (KRAS G13D)
YGASDAGKS

SEQ ID NO: 83885 - protein, 9 aa, synthetic construct
  source 1..9: note = Seed: VGAGDVGKS (KRAS G13D)
YGASDAGKT

SEQ ID NO: 83886 - protein, 9 aa, synthetic construct
  source 1..9: note = Seed: VGAGDVGKS (KRAS G13D)
YGASDAGKV

SEQ ID NO: 83887 - protein, 9 aa, synthetic construct
  source 1..9: note = Seed: VGAGDVGKS (KRAS G13D)
YGASDGGKL

SEQ ID NO: 83888 - protein, 9 aa, synthetic construct
  source 1..9: note = Seed: VGAGDVGKS (KRAS G13D)
YGASDSGKA

SEQ ID NO: 83889 - protein, 9 aa, synthetic construct
  source 1..9: note = Seed: VGAGDVGKS (KRAS G13D)
YGASDSGKL

SEQ ID NO: 83890 - protein, 9 aa, synthetic construct
  source 1..9: note = Seed: VGAGDVGKS (KRAS G13D)
YGATDAGKI

SEQ ID NO: 83891 - protein, 9 aa, synthetic construct
  source 1..9: note = Seed: VGAGDVGKS (KRAS G13D)
YGATDAGKL

SEQ ID NO: 83892 - protein, 9 aa, synthetic construct
  source 1..9: note = Seed: VGAGDVGKS (KRAS G13D)
YGATDAGKV

SEQ ID NO: 83893 - protein, 9 aa, synthetic construct
  source 1..9: note = Seed: VGAGDVGKS (KRAS G13D)
YGAVDAGKA

SEQ ID NO: 83894 - protein, 9 aa, synthetic construct
  source 1..9: note = Seed: VGAGDVGKS (KRAS G13D)
YGAVDAGKI

SEQ ID NO: 83895 - protein, 9 aa, synthetic construct
  source 1..9: note = Seed: VGAGDVGKS (KRAS G13D)
YGAVDAGKL

SEQ ID NO: 83896 - protein, 9 aa, synthetic construct
  source 1..9: note = Seed: VGAGDVGKS (KRAS G13D)
YGAVDAGKM

SEQ ID NO: 83897 - protein, 9 aa, synthetic construct
  source 1..9: note = Seed: VGAGDVGKS (KRAS G13D)
YGAVDAGKS

SEQ ID NO: 83898 - protein, 9 aa, synthetic construct
  source 1..9: note = Seed: VGAGDVGKS (KRAS G13D)
YGAVDAGKT

SEQ ID NO: 83899 - protein, 9 aa, synthetic construct
  source 1..9: note = Seed: VGAGDVGKS (KRAS G13D)
YGAVDAGKV

SEQ ID NO: 83900 - protein, 9 aa, synthetic construct
  source 1..9: note = Seed: VGAGDVGKS (KRAS G13D)
YGAVDGGKA

SEQ ID NO: 83901 - protein, 9 aa, synthetic construct
  source 1..9: note = Seed: VGAGDVGKS (KRAS G13D)
YGAVDGGKI

SEQ ID NO: 83902 - protein, 9 aa, synthetic construct
  source 1..9: note = Seed: VGAGDVGKS (KRAS G13D)
YGAVDGGKL

SEQ ID NO: 83903 - protein, 9 aa, synthetic construct
  source 1..9: note = Seed: VGAGDVGKS (KRAS G13D)
YGAVDGGKM

SEQ ID NO: 83904 - protein, 9 aa, synthetic construct
  source 1..9: note = Seed: VGAGDVGKS (KRAS G13D)
YGAVDGGKT

SEQ ID NO: 83905 - protein, 9 aa, synthetic construct
  source 1..9: note = Seed: VGAGDVGKS (KRAS G13D)
YGAVDGGKV

SEQ ID NO: 83906 - protein, 9 aa, synthetic construct
  source 1..9: note = Seed: VGAGDVGKS (KRAS G13D)
YGAVDNGKI

SEQ ID NO: 83907 - protein, 9 aa, synthetic construct
  source 1..9: note = Seed: VGAGDVGKS (KRAS G13D)
YGAVDNGKL

SEQ ID NO: 83908 - protein, 9 aa, synthetic construct
  source 1..9: note = Seed: VGAGDVGKS (KRAS G13D)
YGAVDNGKV

SEQ ID NO: 83909 - protein, 9 aa, synthetic construct
  source 1..9: note = Seed: VGAGDVGKS (KRAS G13D)
YGAVDPGKA

SEQ ID NO: 83910 - protein, 9 aa, synthetic construct
  source 1..9: note = Seed: VGAGDVGKS (KRAS G13D)
YGAVDPGKI

SEQ ID NO: 83911 - protein, 9 aa, synthetic construct
  source 1..9: note = Seed: VGAGDVGKS (KRAS G13D)
YGAVDPGKL

SEQ ID NO: 83912 - protein, 9 aa, synthetic construct
  source 1..9: note = Seed: VGAGDVGKS (KRAS G13D)
YGAVDPGKM

SEQ ID NO: 83913 - protein, 9 aa, synthetic construct
  source 1..9: note = Seed: VGAGDVGKS (KRAS G13D)
YGAVDPGKV

SEQ ID NO: 83914 - protein, 9 aa, synthetic construct
  source 1..9: note = Seed: VGAGDVGKS (KRAS G13D)
YGAVDSGKA

SEQ ID NO: 83915 - protein, 9 aa, synthetic construct
  source 1..9: note = Seed: VGAGDVGKS (KRAS G13D)
YGAVDSGKI

SEQ ID NO: 83916 - protein, 9 aa, synthetic construct
  source 1..9: note = Seed: VGAGDVGKS (KRAS G13D)
YGAVDSGKL

SEQ ID NO: 83917 - protein, 9 aa, synthetic construct
  source 1..9: note = Seed: VGAGDVGKS (KRAS G13D)
YGAVDSGKM

SEQ ID NO: 83918 - protein, 9 aa, synthetic construct
  source 1..9: note = Seed: VGAGDVGKS (KRAS G13D)
YGAVDSGKT

SEQ ID NO: 83919 - protein, 9 aa, synthetic construct
  source 1..9: note = Seed: VGAGDVGKS (KRAS G13D)
YGAVDSGKV

SEQ ID NO: 83920 - protein, 9 aa, synthetic construct
  source 1..9: note = Seed: VGAGDVGKS (KRAS G13D)
YGAVDTGKA

SEQ ID NO: 83921 - protein, 9 aa, synthetic construct
  source 1..9: note = Seed: VGAGDVGKS (KRAS G13D)
YGAVDTGKI

SEQ ID NO: 83922 - protein, 9 aa, synthetic construct
  source 1..9: note = Seed: VGAGDVGKS (KRAS G13D)
YGAVDTGKL

SEQ ID NO: 83923 - protein, 9 aa, synthetic construct
  source 1..9: note = Seed: VGAGDVGKS (KRAS G13D)
YGAVDTGKV

SEQ ID NO: 83924 - protein, 9 aa, synthetic construct
  source 1..9: note = Seed: VVVGAGDVG (KRAS G13D)
AVVFAADVA

SEQ ID NO: 83925 - protein, 9 aa, synthetic construct
  source 1..9: note = Seed: VVVGAGDVG (KRAS G13D)
AVVFAADVI

SEQ ID NO: 83926 - protein, 9 aa, synthetic construct
  source 1..9: note = Seed: VVVGAGDVG (KRAS G13D)
AVVFAADVL

SEQ ID NO: 83927 - protein, 9 aa, synthetic construct
  source 1..9: note = Seed: VVVGAGDVG (KRAS G13D)
AVVFAADVM

SEQ ID NO: 83928 - protein, 9 aa, synthetic construct
  source 1..9: note = Seed: VVVGAGDVG (KRAS G13D)
AVVFAADVV

SEQ ID NO: 83929 - protein, 9 aa, synthetic construct
  source 1..9: note = Seed: VVVGAGDVG (KRAS G13D)
AVVFADDVA

SEQ ID NO: 83930 - protein, 9 aa, synthetic construct
  source 1..9: note = Seed: VVVGAGDVG (KRAS G13D)
AVVFADDVF

SEQ ID NO: 83931 - protein, 9 aa, synthetic construct
  source 1..9: note = Seed: VVVGAGDVG (KRAS G13D)
AVVFADDVI

SEQ ID NO: 83932 - protein, 9 aa, synthetic construct
  source 1..9: note = Seed: VVVGAGDVG (KRAS G13D)
AVVFADDVL

SEQ ID NO: 83933 - protein, 9 aa, synthetic construct
  source 1..9: note = Seed: VVVGAGDVG (KRAS G13D)
AVVFADDVM

SEQ ID NO: 83934 - protein, 9 aa, synthetic construct
  source 1..9: note = Seed: VVVGAGDVG (KRAS G13D)
AVVFADDVV

SEQ ID NO: 83935 - protein, 9 aa, synthetic construct
  source 1..9: note = Seed: VVVGAGDVG (KRAS G13D)
AVVFADDVY

SEQ ID NO: 83936 - protein, 9 aa, synthetic construct
  source 1..9: note = Seed: VVVGAGDVG (KRAS G13D)
AVVFAIDVA

SEQ ID NO: 83937 - protein, 9 aa, synthetic construct
  source 1..9: note = Seed: VVVGAGDVG (KRAS G13D)
AVVFAIDVM

SEQ ID NO: 83938 - protein, 9 aa, synthetic construct
  source 1..9: note = Seed: VVVGAGDVG (KRAS G13D)
AVVFANDVA

SEQ ID NO: 83939 - protein, 9 aa, synthetic construct
  source 1..9: note = Seed: VVVGAGDVG (KRAS G13D)
AVVFANDVG

SEQ ID NO: 83940 - protein, 9 aa, synthetic construct
  source 1..9: note = Seed: VVVGAGDVG (KRAS G13D)
AVVFANDVM

SEQ ID NO: 83941 - protein, 9 aa, synthetic construct
  source 1..9: note = Seed: VVVGAGDVG (KRAS G13D)
AVVFANDVS

SEQ ID NO: 83942 - protein, 9 aa, synthetic construct
  source 1..9: note = Seed: VVVGAGDVG (KRAS G13D)
AVVFAPDVA

SEQ ID NO: 83943 - protein, 9 aa, synthetic construct
  source 1..9: note = Seed: VVVGAGDVG (KRAS G13D)
AVVFAPDVI

SEQ ID NO: 83944 - protein, 9 aa, synthetic construct
  source 1..9: note = Seed: VVVGAGDVG (KRAS G13D)
AVVFAPDVM

SEQ ID NO: 83945 - protein, 9 aa, synthetic construct
  source 1..9: note = Seed: VVVGAGDVG (KRAS G13D)
AVVFAPDVV

SEQ ID NO: 83946 - protein, 9 aa, synthetic construct
  source 1..9: note = Seed: VVVGAGDVG (KRAS G13D)
AVVFASDVA

SEQ ID NO: 83947 - protein, 9 aa, synthetic construct
  source 1..9: note = Seed: VVVGAGDVG (KRAS G13D)
AVVFASDVF

SEQ ID NO: 83948 - protein, 9 aa, synthetic construct
  source 1..9: note = Seed: VVVGAGDVG (KRAS G13D)
AVVFASDVI

SEQ ID NO: 83949 - protein, 9 aa, synthetic construct
  source 1..9: note = Seed: VVVGAGDVG (KRAS G13D)
AVVFASDVM

SEQ ID NO: 83950 - protein, 9 aa, synthetic construct
  source 1..9: note = Seed: VVVGAGDVG (KRAS G13D)
AVVFASDVV

SEQ ID NO: 83951 - protein, 9 aa, synthetic construct
  source 1..9: note = Seed: VVVGAGDVG (KRAS G13D)
AVVFATDVA

SEQ ID NO: 83952 - protein, 9 aa, synthetic construct
  source 1..9: note = Seed: VVVGAGDVG (KRAS G13D)
AVVFATDVM

SEQ ID NO: 83953 - protein, 9 aa, synthetic construct
  source 1..9: note = Seed: VVVGAGDVG (KRAS G13D)
AVVFAVDVA

SEQ ID NO: 83954 - protein, 9 aa, synthetic construct
  source 1..9: note = Seed: VVVGAGDVG (KRAS G13D)
AVVIANDVI

SEQ ID NO: 83955 - protein, 9 aa, synthetic construct
  source 1..9: note = Seed: VVVGAGDVG (KRAS G13D)
AVVIANDVM

SEQ ID NO: 83956 - protein, 9 aa, synthetic construct
  source 1..9: note = Seed: VVVGAGDVG (KRAS G13D)
AVVLAADVG

SEQ ID NO: 83957 - protein, 9 aa, synthetic construct
  source 1..9: note = Seed: VVVGAGDVG (KRAS G13D)
AVVLAADVS

SEQ ID NO: 83958 - protein, 9 aa, synthetic construct
  source 1..9: note = Seed: VVVGAGDVG (KRAS G13D)
AVVLAGDVA

SEQ ID NO: 83959 - protein, 9 aa, synthetic construct
  source 1..9: note = Seed: VVVGAGDVG (KRAS G13D)
AVVLAPDVA

SEQ ID NO: 83960 - protein, 9 aa, synthetic construct
  source 1..9: note = Seed: VVVGAGDVG (KRAS G13D)
AVVLAPDVN

SEQ ID NO: 83961 - protein, 9 aa, synthetic construct
  source 1..9: note = Seed: VVVGAGDVG (KRAS G13D)
AVVLAPDVS

SEQ ID NO: 83962 - protein, 9 aa, synthetic construct
  source 1..9: note = Seed: VVVGAGDVG (KRAS G13D)
AVVLAPDVT

SEQ ID NO: 83963 - protein, 9 aa, synthetic construct
  source 1..9: note = Seed: VVVGAGDVG (KRAS G13D)
AVVLAPDVV

SEQ ID NO: 83964 - protein, 9 aa, synthetic construct
  source 1..9: note = Seed: VVVGAGDVG (KRAS G13D)
AVVLASDVS

SEQ ID NO: 83965 - protein, 9 aa, synthetic construct
  source 1..9: note = Seed: VVVGAGDVG (KRAS G13D)
AVVLATDVG

SEQ ID NO: 83966 - protein, 9 aa, synthetic construct
  source 1..9: note = Seed: VVVGAGDVG (KRAS G13D)
AVVLATDVS

SEQ ID NO: 83967 - protein, 9 aa, synthetic construct
  source 1..9: note = Seed: VVVGAGDVG (KRAS G13D)
AVVMAADVG

SEQ ID NO: 83968 - protein, 9 aa, synthetic construct
  source 1..9: note = Seed: VVVGAGDVG (KRAS G13D)
AVVMAADVS

SEQ ID NO: 83969 - protein, 9 aa, synthetic construct
  source 1..9: note = Seed: VVVGAGDVG (KRAS G13D)
AVVMADDVL

SEQ ID NO: 83970 - protein, 9 aa, synthetic construct
  source 1..9: note = Seed: VVVGAGDVG (KRAS G13D)
AVVMAGDVA

SEQ ID NO: 83971 - protein, 9 aa, synthetic construct
  source 1..9: note = Seed: VVVGAGDVG (KRAS G13D)
AVVMANDVA

SEQ ID NO: 83972 - protein, 9 aa, synthetic construct
  source 1..9: note = Seed: VVVGAGDVG (KRAS G13D)
AVVMANDVC

SEQ ID NO: 83973 - protein, 9 aa, synthetic construct
  source 1..9: note = Seed: VVVGAGDVG (KRAS G13D)
AVVMAPDVA

SEQ ID NO: 83974 - protein, 9 aa, synthetic construct
  source 1..9: note = Seed: VVVGAGDVG (KRAS G13D)
AVVMAPDVI

SEQ ID NO: 83975 - protein, 9 aa, synthetic construct
  source 1..9: note = Seed: VVVGAGDVG (KRAS G13D)
AVVMAPDVN

SEQ ID NO: 83976 - protein, 9 aa, synthetic construct
  source 1..9: note = Seed: VVVGAGDVG (KRAS G13D)
AVVMAPDVS

SEQ ID NO: 83977 - protein, 9 aa, synthetic construct
  source 1..9: note = Seed: VVVGAGDVG (KRAS G13D)
AVVMAPDVT

SEQ ID NO: 83978 - protein, 9 aa, synthetic construct
  source 1..9: note = Seed: VVVGAGDVG (KRAS G13D)
AVVMAPDVV

SEQ ID NO: 83979 - protein, 9 aa, synthetic construct
  source 1..9: note = Seed: VVVGAGDVG (KRAS G13D)
AVVMASDVN

SEQ ID NO: 83980 - protein, 9 aa, synthetic construct
  source 1..9: note = Seed: VVVGAGDVG (KRAS G13D)
AVVMASDVS

SEQ ID NO: 83981 - protein, 9 aa, synthetic construct
  source 1..9: note = Seed: VVVGAGDVG (KRAS G13D)
AVVMATDVA

SEQ ID NO: 83982 - protein, 9 aa, synthetic construct
  source 1..9: note = Seed: VVVGAGDVG (KRAS G13D)
AVVMATDVM

SEQ ID NO: 83983 - protein, 9 aa, synthetic construct
  source 1..9: note = Seed: VVVGAGDVG (KRAS G13D)
AVVMATDVN

SEQ ID NO: 83984 - protein, 9 aa, synthetic construct
  source 1..9: note = Seed: VVVGAGDVG (KRAS G13D)
AVVMATDVS

SEQ ID NO: 83985 - protein, 9 aa, synthetic construct
  source 1..9: note = Seed: VVVGAGDVG (KRAS G13D)
AVVMATDVT

SEQ ID NO: 83986 - protein, 9 aa, synthetic construct
  source 1..9: note = Seed: VVVGAGDVG (KRAS G13D)
AVVMAVDVS

SEQ ID NO: 83987 - protein, 9 aa, synthetic construct
  source 1..9: note = Seed: VVVGAGDVG (KRAS G13D)
AVVWAADVA

SEQ ID NO: 83988 - protein, 9 aa, synthetic construct
  source 1..9: note = Seed: VVVGAGDVG (KRAS G13D)
AVVWAADVI

SEQ ID NO: 83989 - protein, 9 aa, synthetic construct
  source 1..9: note = Seed: VVVGAGDVG (KRAS G13D)
AVVWAADVL

SEQ ID NO: 83990 - protein, 9 aa, synthetic construct
  source 1..9: note = Seed: VVVGAGDVG (KRAS G13D)
AVVWAADVM

SEQ ID NO: 83991 - protein, 9 aa, synthetic construct
  source 1..9: note = Seed: VVVGAGDVG (KRAS G13D)
AVVWAADVS

SEQ ID NO: 83992 - protein, 9 aa, synthetic construct
  source 1..9: note = Seed: VVVGAGDVG (KRAS G13D)
AVVWAADVV

SEQ ID NO: 83993 - protein, 9 aa, synthetic construct
  source 1..9: note = Seed: VVVGAGDVG (KRAS G13D)
AVVWADDVA

SEQ ID NO: 83994 - protein, 9 aa, synthetic construct
  source 1..9: note = Seed: VVVGAGDVG (KRAS G13D)
AVVWADDVF

SEQ ID NO: 83995 - protein, 9 aa, synthetic construct
  source 1..9: note = Seed: VVVGAGDVG (KRAS G13D)
AVVWADDVI

SEQ ID NO: 83996 - protein, 9 aa, synthetic construct
  source 1..9: note = Seed: VVVGAGDVG (KRAS G13D)
AVVWADDVL

SEQ ID NO: 83997 - protein, 9 aa, synthetic construct
  source 1..9: note = Seed: VVVGAGDVG (KRAS G13D)
AVVWADDVM

SEQ ID NO: 83998 - protein, 9 aa, synthetic construct
  source 1..9: note = Seed: VVVGAGDVG (KRAS G13D)
AVVWADDVV

SEQ ID NO: 83999 - protein, 9 aa, synthetic construct
  source 1..9: note = Seed: VVVGAGDVG (KRAS G13D)
AVVWADDVW

SEQ ID NO: 84000 - protein, 9 aa, synthetic construct
  source 1..9: note = Seed: VVVGAGDVG (KRAS G13D)
AVVWADDVY

SEQ ID NO: 84001 - protein, 9 aa, synthetic construct
  source 1..9: note = Seed: VVVGAGDVG (KRAS G13D)
AVVWAEDVI

SEQ ID NO: 84002 - protein, 9 aa, synthetic construct
  source 1..9: note = Seed: VVVGAGDVG (KRAS G13D)
AVVWAEDVL

SEQ ID NO: 84003 - protein, 9 aa, synthetic construct
  source 1..9: note = Seed: VVVGAGDVG (KRAS G13D)
AVVWAIDVA

SEQ ID NO: 84004 - protein, 9 aa, synthetic construct
  source 1..9: note = Seed: VVVGAGDVG (KRAS G13D)
AVVWAIDVF

SEQ ID NO: 84005 - protein, 9 aa, synthetic construct
  source 1..9: note = Seed: VVVGAGDVG (KRAS G13D)
AVVWAIDVI

SEQ ID NO: 84006 - protein, 9 aa, synthetic construct
  source 1..9: note = Seed: VVVGAGDVG (KRAS G13D)
AVVWAIDVL

SEQ ID NO: 84007 - protein, 9 aa, synthetic construct
  source 1..9: note = Seed: VVVGAGDVG (KRAS G13D)
AVVWAIDVM

SEQ ID NO: 84008 - protein, 9 aa, synthetic construct
  source 1..9: note = Seed: VVVGAGDVG (KRAS G13D)
AVVWAIDVQ

SEQ ID NO: 84009 - protein, 9 aa, synthetic construct
  source 1..9: note = Seed: VVVGAGDVG (KRAS G13D)
AVVWAIDVS

SEQ ID NO: 84010 - protein, 9 aa, synthetic construct
  source 1..9: note = Seed: VVVGAGDVG (KRAS G13D)
AVVWAIDVV

SEQ ID NO: 84011 - protein, 9 aa, synthetic construct
  source 1..9: note = Seed: VVVGAGDVG (KRAS G13D)
AVVWALDVA

SEQ ID NO: 84012 - protein, 9 aa, synthetic construct
  source 1..9: note = Seed: VVVGAGDVG (KRAS G13D)
AVVWALDVI

SEQ ID NO: 84013 - protein, 9 aa, synthetic construct
  source 1..9: note = Seed: VVVGAGDVG (KRAS G13D)
AVVWALDVL

SEQ ID NO: 84014 - protein, 9 aa, synthetic construct
  source 1..9: note = Seed: VVVGAGDVG (KRAS G13D)
AVVWALDVM

SEQ ID NO: 84015 - protein, 9 aa, synthetic construct
  source 1..9: note = Seed: VVVGAGDVG (KRAS G13D)
AVVWALDVV

SEQ ID NO: 84016 - protein, 9 aa, synthetic construct
  source 1..9: note = Seed: VVVGAGDVG (KRAS G13D)
AVVWANDVA

SEQ ID NO: 84017 - protein, 9 aa, synthetic construct
  source 1..9: note = Seed: VVVGAGDVG (KRAS G13D)
AVVWANDVD

SEQ ID NO: 84018 - protein, 9 aa, synthetic construct
  source 1..9: note = Seed: VVVGAGDVG (KRAS G13D)
AVVWANDVG

SEQ ID NO: 84019 - protein, 9 aa, synthetic construct
  source 1..9: note = Seed: VVVGAGDVG (KRAS G13D)
AVVWANDVI

SEQ ID NO: 84020 - protein, 9 aa, synthetic construct
  source 1..9: note = Seed: VVVGAGDVG (KRAS G13D)
AVVWANDVL

SEQ ID NO: 84021 - protein, 9 aa, synthetic construct
  source 1..9: note = Seed: VVVGAGDVG (KRAS G13D)
AVVWANDVM

SEQ ID NO: 84022 - protein, 9 aa, synthetic construct
  source 1..9: note = Seed: VVVGAGDVG (KRAS G13D)
AVVWANDVS

SEQ ID NO: 84023 - protein, 9 aa, synthetic construct
  source 1..9: note = Seed: VVVGAGDVG (KRAS G13D)
AVVWANDVV

SEQ ID NO: 84024 - protein, 9 aa, synthetic construct
  source 1..9: note = Seed: VVVGAGDVG (KRAS G13D)
AVVWAPDVA

SEQ ID NO: 84025 - protein, 9 aa, synthetic construct
  source 1..9: note = Seed: VVVGAGDVG (KRAS G13D)
AVVWAPDVI

SEQ ID NO: 84026 - protein, 9 aa, synthetic construct
  source 1..9: note = Seed: VVVGAGDVG (KRAS G13D)
AVVWAPDVL

SEQ ID NO: 84027 - protein, 9 aa, synthetic construct
  source 1..9: note = Seed: VVVGAGDVG (KRAS G13D)
AVVWAPDVM

SEQ ID NO: 84028 - protein, 9 aa, synthetic construct
  source 1..9: note = Seed: VVVGAGDVG (KRAS G13D)
AVVWAPDVV

SEQ ID NO: 84029 - protein, 9 aa, synthetic construct
  source 1..9: note = Seed: VVVGAGDVG (KRAS G13D)
AVVWASDVA

SEQ ID NO: 84030 - protein, 9 aa, synthetic construct
  source 1..9: note = Seed: VVVGAGDVG (KRAS G13D)
AVVWASDVI

SEQ ID NO: 84031 - protein, 9 aa, synthetic construct
  source 1..9: note = Seed: VVVGAGDVG (KRAS G13D)
AVVWASDVL

SEQ ID NO: 84032 - protein, 9 aa, synthetic construct
  source 1..9: note = Seed: VVVGAGDVG (KRAS G13D)
AVVWASDVM

SEQ ID NO: 84033 - protein, 9 aa, synthetic construct
  source 1..9: note = Seed: VVVGAGDVG (KRAS G13D)
AVVWASDVV

SEQ ID NO: 84034 - protein, 9 aa, synthetic construct
  source 1..9: note = Seed: VVVGAGDVG (KRAS G13D)
AVVWATDVA

SEQ ID NO: 84035 - protein, 9 aa, synthetic construct
  source 1..9: note = Seed: VVVGAGDVG (KRAS G13D)
AVVWATDVF

SEQ ID NO: 84036 - protein, 9 aa, synthetic construct
  source 1..9: note = Seed: VVVGAGDVG (KRAS G13D)
AVVWATDVI

SEQ ID NO: 84037 - protein, 9 aa, synthetic construct
  source 1..9: note = Seed: VVVGAGDVG (KRAS G13D)
AVVWATDVL

SEQ ID NO: 84038 - protein, 9 aa, synthetic construct
  source 1..9: note = Seed: VVVGAGDVG (KRAS G13D)
AVVWATDVM

SEQ ID NO: 84039 - protein, 9 aa, synthetic construct
  source 1..9: note = Seed: VVVGAGDVG (KRAS G13D)
AVVWATDVV

SEQ ID NO: 84040 - protein, 9 aa, synthetic construct
  source 1..9: note = Seed: VVVGAGDVG (KRAS G13D)
AVVWAVDVA

SEQ ID NO: 84041 - protein, 9 aa, synthetic construct
  source 1..9: note = Seed: VVVGAGDVG (KRAS G13D)
AVVWAVDVI

SEQ ID NO: 84042 - protein, 9 aa, synthetic construct
  source 1..9: note = Seed: VVVGAGDVG (KRAS G13D)
AVVWAVDVL

SEQ ID NO: 84043 - protein, 9 aa, synthetic construct
  source 1..9: note = Seed: VVVGAGDVG (KRAS G13D)
AVVWAVDVM

SEQ ID NO: 84044 - protein, 9 aa, synthetic construct
  source 1..9: note = Seed: VVVGAGDVG (KRAS G13D)
AVVWAVDVQ

SEQ ID NO: 84045 - protein, 9 aa, synthetic construct
  source 1..9: note = Seed: VVVGAGDVG (KRAS G13D)
AVVWAVDVS

SEQ ID NO: 84046 - protein, 9 aa, synthetic construct
  source 1..9: note = Seed: VVVGAGDVG (KRAS G13D)
AVVWAVDVV

SEQ ID NO: 84047 - protein, 9 aa, synthetic construct
  source 1..9: note = Seed: VVVGAGDVG (KRAS G13D)
AVVYAADVI

SEQ ID NO: 84048 - protein, 9 aa, synthetic construct
  source 1..9: note = Seed: VVVGAGDVG (KRAS G13D)
AVVYAADVL

SEQ ID NO: 84049 - protein, 9 aa, synthetic construct
  source 1..9: note = Seed: VVVGAGDVG (KRAS G13D)
AVVYAADVM

SEQ ID NO: 84050 - protein, 9 aa, synthetic construct
  source 1..9: note = Seed: VVVGAGDVG (KRAS G13D)
AVVYAADVS

SEQ ID NO: 84051 - protein, 9 aa, synthetic construct
  source 1..9: note = Seed: VVVGAGDVG (KRAS G13D)
AVVYAADVV

SEQ ID NO: 84052 - protein, 9 aa, synthetic construct
  source 1..9: note = Seed: VVVGAGDVG (KRAS G13D)
AVVYADDVA

SEQ ID NO: 84053 - protein, 9 aa, synthetic construct
  source 1..9: note = Seed: VVVGAGDVG (KRAS G13D)
AVVYADDVF

SEQ ID NO: 84054 - protein, 9 aa, synthetic construct
  source 1..9: note = Seed: VVVGAGDVG (KRAS G13D)
AVVYADDVI

SEQ ID NO: 84055 - protein, 9 aa, synthetic construct
  source 1..9: note = Seed: VVVGAGDVG (KRAS G13D)
AVVYADDVL

SEQ ID NO: 84056 - protein, 9 aa, synthetic construct
  source 1..9: note = Seed: VVVGAGDVG (KRAS G13D)
AVVYADDVM

SEQ ID NO: 84057 - protein, 9 aa, synthetic construct
  source 1..9: note = Seed: VVVGAGDVG (KRAS G13D)
AVVYADDVV

SEQ ID NO: 84058 - protein, 9 aa, synthetic construct
  source 1..9: note = Seed: VVVGAGDVG (KRAS G13D)
AVVYAIDVM

SEQ ID NO: 84059 - protein, 9 aa, synthetic construct
  source 1..9: note = Seed: VVVGAGDVG (KRAS G13D)
AVVYAIDVS

SEQ ID NO: 84060 - protein, 9 aa, synthetic construct
  source 1..9: note = Seed: VVVGAGDVG (KRAS G13D)
AVVYALDVA

SEQ ID NO: 84061 - protein, 9 aa, synthetic construct
  source 1..9: note = Seed: VVVGAGDVG (KRAS G13D)
AVVYALDVI

SEQ ID NO: 84062 - protein, 9 aa, synthetic construct
  source 1..9: note = Seed: VVVGAGDVG (KRAS G13D)
AVVYALDVM

SEQ ID NO: 84063 - protein, 9 aa, synthetic construct
  source 1..9: note = Seed: VVVGAGDVG (KRAS G13D)
AVVYALDVS

SEQ ID NO: 84064 - protein, 9 aa, synthetic construct
  source 1..9: note = Seed: VVVGAGDVG (KRAS G13D)
AVVYALDVV

SEQ ID NO: 84065 - protein, 9 aa, synthetic construct
  source 1..9: note = Seed: VVVGAGDVG (KRAS G13D)
AVVYALDVY

SEQ ID NO: 84066 - protein, 9 aa, synthetic construct
  source 1..9: note = Seed: VVVGAGDVG (KRAS G13D)
AVVYANDVA

SEQ ID NO: 84067 - protein, 9 aa, synthetic construct
  source 1..9: note = Seed: VVVGAGDVG (KRAS G13D)
AVVYANDVS

SEQ ID NO: 84068 - protein, 9 aa, synthetic construct
  source 1..9: note = Seed: VVVGAGDVG (KRAS G13D)
AVVYAPDVI

SEQ ID NO: 84069 - protein, 9 aa, synthetic construct
  source 1..9: note = Seed: VVVGAGDVG (KRAS G13D)
AVVYAPDVL

SEQ ID NO: 84070 - protein, 9 aa, synthetic construct
  source 1..9: note = Seed: VVVGAGDVG (KRAS G13D)
AVVYAPDVM

SEQ ID NO: 84071 - protein, 9 aa, synthetic construct
  source 1..9: note = Seed: VVVGAGDVG (KRAS G13D)
AVVYAPDVV

SEQ ID NO: 84072 - protein, 9 aa, synthetic construct
  source 1..9: note = Seed: VVVGAGDVG (KRAS G13D)
AVVYASDVA

SEQ ID NO: 84073 - protein, 9 aa, synthetic construct
  source 1..9: note = Seed: VVVGAGDVG (KRAS G13D)
AVVYASDVF

SEQ ID NO: 84074 - protein, 9 aa, synthetic construct
  source 1..9: note = Seed: VVVGAGDVG (KRAS G13D)
AVVYASDVI

SEQ ID NO: 84075 - protein, 9 aa, synthetic construct
  source 1..9: note = Seed: VVVGAGDVG (KRAS G13D)
AVVYASDVL

SEQ ID NO: 84076 - protein, 9 aa, synthetic construct
  source 1..9: note = Seed: VVVGAGDVG (KRAS G13D)
AVVYASDVM

SEQ ID NO: 84077 - protein, 9 aa, synthetic construct
  source 1..9: note = Seed: VVVGAGDVG (KRAS G13D)
AVVYASDVV

SEQ ID NO: 84078 - protein, 9 aa, synthetic construct
  source 1..9: note = Seed: VVVGAGDVG (KRAS G13D)
AVVYATDVA

SEQ ID NO: 84079 - protein, 9 aa, synthetic construct
  source 1..9: note = Seed: VVVGAGDVG (KRAS G13D)
AVVYAVDVA

SEQ ID NO: 84080 - protein, 9 aa, synthetic construct
  source 1..9: note = Seed: VVVGAGDVG (KRAS G13D)
AVVYAVDVI

SEQ ID NO: 84081 - protein, 9 aa, synthetic construct
  source 1..9: note = Seed: VVVGAGDVG (KRAS G13D)
AVVYAVDVL

SEQ ID NO: 84082 - protein, 9 aa, synthetic construct
  source 1..9: note = Seed: VVVGAGDVG (KRAS G13D)
AVVYAVDVM

SEQ ID NO: 84083 - protein, 9 aa, synthetic construct
  source 1..9: note = Seed: VVVGAGDVG (KRAS G13D)
AVVYAVDVS

SEQ ID NO: 84084 - protein, 9 aa, synthetic construct
  source 1..9: note = Seed: VVVGAGDVG (KRAS G13D)
AVVYAVDVV

SEQ ID NO: 84085 - protein, 9 aa, synthetic construct
  source 1..9: note = Seed: VVVGAGDVG (KRAS G13D)
CVVFAIDVA

SEQ ID NO: 84086 - protein, 9 aa, synthetic construct
  source 1..9: note = Seed: VVVGAGDVG (KRAS G13D)
CVVFANDVA

SEQ ID NO: 84087 - protein, 9 aa, synthetic construct
  source 1..9: note = Seed: VVVGAGDVG (KRAS G13D)
CVVFANDVI

SEQ ID NO: 84088 - protein, 9 aa, synthetic construct
  source 1..9: note = Seed: VVVGAGDVG (KRAS G13D)
CVVFANDVL

SEQ ID NO: 84089 - protein, 9 aa, synthetic construct
  source 1..9: note = Seed: VVVGAGDVG (KRAS G13D)
CVVFANDVV

SEQ ID NO: 84090 - protein, 9 aa, synthetic construct
  source 1..9: note = Seed: VVVGAGDVG (KRAS G13D)
CVVIAPDVA

SEQ ID NO: 84091 - protein, 9 aa, synthetic construct
  source 1..9: note = Seed: VVVGAGDVG (KRAS G13D)
CVVLAADVG

SEQ ID NO: 84092 - protein, 9 aa, synthetic construct
  source 1..9: note = Seed: VVVGAGDVG (KRAS G13D)
CVVLAADVS

SEQ ID NO: 84093 - protein, 9 aa, synthetic construct
  source 1..9: note = Seed: VVVGAGDVG (KRAS G13D)
CVVLAGDVA

SEQ ID NO: 84094 - protein, 9 aa, synthetic construct
  source 1..9: note = Seed: VVVGAGDVG (KRAS G13D)
CVVLANDVA

SEQ ID NO: 84095 - protein, 9 aa, synthetic construct
  source 1..9: note = Seed: VVVGAGDVG (KRAS G13D)
CVVLANDVN

SEQ ID NO: 84096 - protein, 9 aa, synthetic construct
  source 1..9: note = Seed: VVVGAGDVG (KRAS G13D)
CVVLANDVS

SEQ ID NO: 84097 - protein, 9 aa, synthetic construct
  source 1..9: note = Seed: VVVGAGDVG (KRAS G13D)
CVVLANDVV

SEQ ID NO: 84098 - protein, 9 aa, synthetic construct
  source 1..9: note = Seed: VVVGAGDVG (KRAS G13D)
CVVLAPDVA

SEQ ID NO: 84099 - protein, 9 aa, synthetic construct
  source 1..9: note = Seed: VVVGAGDVG (KRAS G13D)
CVVLAPDVN

SEQ ID NO: 84100 - protein, 9 aa, synthetic construct
  source 1..9: note = Seed: VVVGAGDVG (KRAS G13D)
CVVLAPDVS

SEQ ID NO: 84101 - protein, 9 aa, synthetic construct
  source 1..9: note = Seed: VVVGAGDVG (KRAS G13D)
CVVLAPDVV

SEQ ID NO: 84102 - protein, 9 aa, synthetic construct
  source 1..9: note = Seed: VVVGAGDVG (KRAS G13D)
CVVLASDVS

SEQ ID NO: 84103 - protein, 9 aa, synthetic construct
  source 1..9: note = Seed: VVVGAGDVG (KRAS G13D)
CVVLASDVT

SEQ ID NO: 84104 - protein, 9 aa, synthetic construct
  source 1..9: note = Seed: VVVGAGDVG (KRAS G13D)
CVVLATDVA

SEQ ID NO: 84105 - protein, 9 aa, synthetic construct
  source 1..9: note = Seed: VVVGAGDVG (KRAS G13D)
CVVLATDVS

SEQ ID NO: 84106 - protein, 9 aa, synthetic construct
  source 1..9: note = Seed: VVVGAGDVG (KRAS G13D)
CVVMAADVG

SEQ ID NO: 84107 - protein, 9 aa, synthetic construct
  source 1..9: note = Seed: VVVGAGDVG (KRAS G13D)
CVVMAADVS

SEQ ID NO: 84108 - protein, 9 aa, synthetic construct
  source 1..9: note = Seed: VVVGAGDVG (KRAS G13D)
CVVMAADVT

SEQ ID NO: 84109 - protein, 9 aa, synthetic construct
  source 1..9: note = Seed: VVVGAGDVG (KRAS G13D)
CVVMAGDVA

SEQ ID NO: 84110 - protein, 9 aa, synthetic construct
  source 1..9: note = Seed: VVVGAGDVG (KRAS G13D)
CVVMALDVA

SEQ ID NO: 84111 - protein, 9 aa, synthetic construct
  source 1..9: note = Seed: VVVGAGDVG (KRAS G13D)
CVVMANDVA

SEQ ID NO: 84112 - protein, 9 aa, synthetic construct
  source 1..9: note = Seed: VVVGAGDVG (KRAS G13D)
CVVMANDVL

SEQ ID NO: 84113 - protein, 9 aa, synthetic construct
  source 1..9: note = Seed: VVVGAGDVG (KRAS G13D)
CVVMANDVN

SEQ ID NO: 84114 - protein, 9 aa, synthetic construct
  source 1..9: note = Seed: VVVGAGDVG (KRAS G13D)
CVVMANDVS

SEQ ID NO: 84115 - protein, 9 aa, synthetic construct
  source 1..9: note = Seed: VVVGAGDVG (KRAS G13D)
CVVMANDVV

SEQ ID NO: 84116 - protein, 9 aa, synthetic construct
  source 1..9: note = Seed: VVVGAGDVG (KRAS G13D)
CVVMAPDVA

SEQ ID NO: 84117 - protein, 9 aa, synthetic construct
  source 1..9: note = Seed: VVVGAGDVG (KRAS G13D)
CVVMAPDVI

SEQ ID NO: 84118 - protein, 9 aa, synthetic construct
  source 1..9: note = Seed: VVVGAGDVG (KRAS G13D)
CVVMAPDVL

SEQ ID NO: 84119 - protein, 9 aa, synthetic construct
  source 1..9: note = Seed: VVVGAGDVG (KRAS G13D)
CVVMAPDVM

SEQ ID NO: 84120 - protein, 9 aa, synthetic construct
  source 1..9: note = Seed: VVVGAGDVG (KRAS G13D)
CVVMAPDVN

SEQ ID NO: 84121 - protein, 9 aa, synthetic construct
  source 1..9: note = Seed: VVVGAGDVG (KRAS G13D)
CVVMAPDVS

SEQ ID NO: 84122 - protein, 9 aa, synthetic construct
  source 1..9: note = Seed: VVVGAGDVG (KRAS G13D)
CVVMAPDVT

SEQ ID NO: 84123 - protein, 9 aa, synthetic construct
  source 1..9: note = Seed: VVVGAGDVG (KRAS G13D)
CVVMAPDVV

SEQ ID NO: 84124 - protein, 9 aa, synthetic construct
  source 1..9: note = Seed: VVVGAGDVG (KRAS G13D)
CVVMASDVA

SEQ ID NO: 84125 - protein, 9 aa, synthetic construct
  source 1..9: note = Seed: VVVGAGDVG (KRAS G13D)
CVVMASDVN

SEQ ID NO: 84126 - protein, 9 aa, synthetic construct
  source 1..9: note = Seed: VVVGAGDVG (KRAS G13D)
CVVMASDVS

SEQ ID NO: 84127 - protein, 9 aa, synthetic construct
  source 1..9: note = Seed: VVVGAGDVG (KRAS G13D)
CVVMASDVT

SEQ ID NO: 84128 - protein, 9 aa, synthetic construct
  source 1..9: note = Seed: VVVGAGDVG (KRAS G13D)
CVVMATDVA

SEQ ID NO: 84129 - protein, 9 aa, synthetic construct
  source 1..9: note = Seed: VVVGAGDVG (KRAS G13D)
CVVMATDVM

SEQ ID NO: 84130 - protein, 9 aa, synthetic construct
  source 1..9: note = Seed: VVVGAGDVG (KRAS G13D)
CVVMATDVS

SEQ ID NO: 84131 - protein, 9 aa, synthetic construct
  source 1..9: note = Seed: VVVGAGDVG (KRAS G13D)
CVVMAVDVS

SEQ ID NO: 84132 - protein, 9 aa, synthetic construct
  source 1..9: note = Seed: VVVGAGDVG (KRAS G13D)
CVVWAADVI

SEQ ID NO: 84133 - protein, 9 aa, synthetic construct
  source 1..9: note = Seed: VVVGAGDVG (KRAS G13D)
CVVWAADVL

SEQ ID NO: 84134 - protein, 9 aa, synthetic construct
  source 1..9: note = Seed: VVVGAGDVG (KRAS G13D)
CVVWAADVV

SEQ ID NO: 84135 - protein, 9 aa, synthetic construct
  source 1..9: note = Seed: VVVGAGDVG (KRAS G13D)
CVVWAIDVA

SEQ ID NO: 84136 - protein, 9 aa, synthetic construct
  source 1..9: note = Seed: VVVGAGDVG (KRAS G13D)
CVVWAIDVI

SEQ ID NO: 84137 - protein, 9 aa, synthetic construct
  source 1..9: note = Seed: VVVGAGDVG (KRAS G13D)
CVVWAIDVV

SEQ ID NO: 84138 - protein, 9 aa, synthetic construct
  source 1..9: note = Seed: VVVGAGDVG (KRAS G13D)
CVVWAMDVL

SEQ ID NO: 84139 - protein, 9 aa, synthetic construct
  source 1..9: note = Seed: VVVGAGDVG (KRAS G13D)
CVVWAMDVM

SEQ ID NO: 84140 - protein, 9 aa, synthetic construct
  source 1..9: note = Seed: VVVGAGDVG (KRAS G13D)
CVVWAMDVV

SEQ ID NO: 84141 - protein, 9 aa, synthetic construct
  source 1..9: note = Seed: VVVGAGDVG (KRAS G13D)
CVVWANDVA

SEQ ID NO: 84142 - protein, 9 aa, synthetic construct
  source 1..9: note = Seed: VVVGAGDVG (KRAS G13D)
CVVWANDVI

SEQ ID NO: 84143 - protein, 9 aa, synthetic construct
  source 1..9: note = Seed: VVVGAGDVG (KRAS G13D)
CVVWANDVL

SEQ ID NO: 84144 - protein, 9 aa, synthetic construct
  source 1..9: note = Seed: VVVGAGDVG (KRAS G13D)
CVVWANDVV

SEQ ID NO: 84145 - protein, 9 aa, synthetic construct
  source 1..9: note = Seed: VVVGAGDVG (KRAS G13D)
CVVWAVDVA

SEQ ID NO: 84146 - protein, 9 aa, synthetic construct
  source 1..9: note = Seed: VVVGAGDVG (KRAS G13D)
CVVYAIDVA

SEQ ID NO: 84147 - protein, 9 aa, synthetic construct
  source 1..9: note = Seed: VVVGAGDVG (KRAS G13D)
CVVYAMDVA

SEQ ID NO: 84148 - protein, 9 aa, synthetic construct
  source 1..9: note = Seed: VVVGAGDVG (KRAS G13D)
DVVWAADVI

SEQ ID NO: 84149 - protein, 9 aa, synthetic construct
  source 1..9: note = Seed: VVVGAGDVG (KRAS G13D)
DVVWANDVF

SEQ ID NO: 84150 - protein, 9 aa, synthetic construct
  source 1..9: note = Seed: VVVGAGDVG (KRAS G13D)
DVVWANDVI

SEQ ID NO: 84151 - protein, 9 aa, synthetic construct
  source 1..9: note = Seed: VVVGAGDVG (KRAS G13D)
DVVWANDVL

SEQ ID NO: 84152 - protein, 9 aa, synthetic construct
  source 1..9: note = Seed: VVVGAGDVG (KRAS G13D)
EVVFAADVA

SEQ ID NO: 84153 - protein, 9 aa, synthetic construct
  source 1..9: note = Seed: VVVGAGDVG (KRAS G13D)
EVVFAADVI

SEQ ID NO: 84154 - protein, 9 aa, synthetic construct
  source 1..9: note = Seed: VVVGAGDVG (KRAS G13D)
EVVFAADVL

SEQ ID NO: 84155 - protein, 9 aa, synthetic construct
  source 1..9: note = Seed: VVVGAGDVG (KRAS G13D)
EVVFAADVM

SEQ ID NO: 84156 - protein, 9 aa, synthetic construct
  source 1..9: note = Seed: VVVGAGDVG (KRAS G13D)
EVVFAIDVA

SEQ ID NO: 84157 - protein, 9 aa, synthetic construct
  source 1..9: note = Seed: VVVGAGDVG (KRAS G13D)
EVVFAIDVM

SEQ ID NO: 84158 - protein, 9 aa, synthetic construct
  source 1..9: note = Seed: VVVGAGDVG (KRAS G13D)
EVVFALDVA

SEQ ID NO: 84159 - protein, 9 aa, synthetic construct
  source 1..9: note = Seed: VVVGAGDVG (KRAS G13D)
EVVFAMDVM

SEQ ID NO: 84160 - protein, 9 aa, synthetic construct
  source 1..9: note = Seed: VVVGAGDVG (KRAS G13D)
EVVFANDVA

SEQ ID NO: 84161 - protein, 9 aa, synthetic construct
  source 1..9: note = Seed: VVVGAGDVG (KRAS G13D)
EVVFANDVI

SEQ ID NO: 84162 - protein, 9 aa, synthetic construct
  source 1..9: note = Seed: VVVGAGDVG (KRAS G13D)
EVVFANDVM

SEQ ID NO: 84163 - protein, 9 aa, synthetic construct
  source 1..9: note = Seed: VVVGAGDVG (KRAS G13D)
EVVFANDVV

SEQ ID NO: 84164 - protein, 9 aa, synthetic construct
  source 1..9: note = Seed: VVVGAGDVG (KRAS G13D)
EVVFAVDVA

SEQ ID NO: 84165 - protein, 9 aa, synthetic construct
  source 1..9: note = Seed: VVVGAGDVG (KRAS G13D)
EVVLASDVS

SEQ ID NO: 84166 - protein, 9 aa, synthetic construct
  source 1..9: note = Seed: VVVGAGDVG (KRAS G13D)
EVVMAADVS

SEQ ID NO: 84167 - protein, 9 aa, synthetic construct
  source 1..9: note = Seed: VVVGAGDVG (KRAS G13D)
EVVMANDVV

SEQ ID NO: 84168 - protein, 9 aa, synthetic construct
  source 1..9: note = Seed: VVVGAGDVG (KRAS G13D)
EVVMASDVS

SEQ ID NO: 84169 - protein, 9 aa, synthetic construct
  source 1..9: note = Seed: VVVGAGDVG (KRAS G13D)
EVVMATDVA

SEQ ID NO: 84170 - protein, 9 aa, synthetic construct
  source 1..9: note = Seed: VVVGAGDVG (KRAS G13D)
EVVWAADVI

SEQ ID NO: 84171 - protein, 9 aa, synthetic construct
  source 1..9: note = Seed: VVVGAGDVG (KRAS G13D)
EVVWAADVL

SEQ ID NO: 84172 - protein, 9 aa, synthetic construct
  source 1..9: note = Seed: VVVGAGDVG (KRAS G13D)
EVVWAADVM

SEQ ID NO: 84173 - protein, 9 aa, synthetic construct
  source 1..9: note = Seed: VVVGAGDVG (KRAS G13D)
EVVWAADVV

SEQ ID NO: 84174 - protein, 9 aa, synthetic construct
  source 1..9: note = Seed: VVVGAGDVG (KRAS G13D)
EVVWAIDVI

SEQ ID NO: 84175 - protein, 9 aa, synthetic construct
  source 1..9: note = Seed: VVVGAGDVG (KRAS G13D)
EVVWAIDVL

SEQ ID NO: 84176 - protein, 9 aa, synthetic construct
  source 1..9: note = Seed: VVVGAGDVG (KRAS G13D)
EVVWAIDVM

SEQ ID NO: 84177 - protein, 9 aa, synthetic construct
  source 1..9: note = Seed: VVVGAGDVG (KRAS G13D)
EVVWAIDVS

SEQ ID NO: 84178 - protein, 9 aa, synthetic construct
  source 1..9: note = Seed: VVVGAGDVG (KRAS G13D)
EVVWAIDVV

SEQ ID NO: 84179 - protein, 9 aa, synthetic construct
  source 1..9: note = Seed: VVVGAGDVG (KRAS G13D)
EVVWALDVA

SEQ ID NO: 84180 - protein, 9 aa, synthetic construct
  source 1..9: note = Seed: VVVGAGDVG (KRAS G13D)
EVVWALDVI

SEQ ID NO: 84181 - protein, 9 aa, synthetic construct
  source 1..9: note = Seed: VVVGAGDVG (KRAS G13D)
EVVWALDVL

SEQ ID NO: 84182 - protein, 9 aa, synthetic construct
  source 1..9: note = Seed: VVVGAGDVG (KRAS G13D)
EVVWALDVM

SEQ ID NO: 84183 - protein, 9 aa, synthetic construct
  source 1..9: note = Seed: VVVGAGDVG (KRAS G13D)
EVVWALDVV

SEQ ID NO: 84184 - protein, 9 aa, synthetic construct
  source 1..9: note = Seed: VVVGAGDVG (KRAS G13D)
EVVWANDVA

SEQ ID NO: 84185 - protein, 9 aa, synthetic construct
  source 1..9: note = Seed: VVVGAGDVG (KRAS G13D)
EVVWANDVI

SEQ ID NO: 84186 - protein, 9 aa, synthetic construct
  source 1..9: note = Seed: VVVGAGDVG (KRAS G13D)
EVVWANDVL

SEQ ID NO: 84187 - protein, 9 aa, synthetic construct
  source 1..9: note = Seed: VVVGAGDVG (KRAS G13D)
EVVWANDVM

SEQ ID NO: 84188 - protein, 9 aa, synthetic construct
  source 1..9: note = Seed: VVVGAGDVG (KRAS G13D)
EVVWANDVS

SEQ ID NO: 84189 - protein, 9 aa, synthetic construct
  source 1..9: note = Seed: VVVGAGDVG (KRAS G13D)
EVVWANDVV

SEQ ID NO: 84190 - protein, 9 aa, synthetic construct
  source 1..9: note = Seed: VVVGAGDVG (KRAS G13D)
EVVWAPDVI

SEQ ID NO: 84191 - protein, 9 aa, synthetic construct
  source 1..9: note = Seed: VVVGAGDVG (KRAS G13D)
EVVWAPDVL

SEQ ID NO: 84192 - protein, 9 aa, synthetic construct
  source 1..9: note = Seed: VVVGAGDVG (KRAS G13D)
EVVWAPDVV

SEQ ID NO: 84193 - protein, 9 aa, synthetic construct
  source 1..9: note = Seed: VVVGAGDVG (KRAS G13D)
EVVWASDVI

SEQ ID NO: 84194 - protein, 9 aa, synthetic construct
  source 1..9: note = Seed: VVVGAGDVG (KRAS G13D)
EVVWASDVL

SEQ ID NO: 84195 - protein, 9 aa, synthetic construct
  source 1..9: note = Seed: VVVGAGDVG (KRAS G13D)
EVVWASDVM

SEQ ID NO: 84196 - protein, 9 aa, synthetic construct
  source 1..9: note = Seed: VVVGAGDVG (KRAS G13D)
EVVWASDVV

SEQ ID NO: 84197 - protein, 9 aa, synthetic construct
  source 1..9: note = Seed: VVVGAGDVG (KRAS G13D)
EVVWATDVL

SEQ ID NO: 84198 - protein, 9 aa, synthetic construct
  source 1..9: note = Seed: VVVGAGDVG (KRAS G13D)
EVVWAVDVA

SEQ ID NO: 84199 - protein, 9 aa, synthetic construct
  source 1..9: note = Seed: VVVGAGDVG (KRAS G13D)
EVVWAVDVI

SEQ ID NO: 84200 - protein, 9 aa, synthetic construct
  source 1..9: note = Seed: VVVGAGDVG (KRAS G13D)
EVVWAVDVL

SEQ ID NO: 84201 - protein, 9 aa, synthetic construct
  source 1..9: note = Seed: VVVGAGDVG (KRAS G13D)
EVVWAVDVM

SEQ ID NO: 84202 - protein, 9 aa, synthetic construct
  source 1..9: note = Seed: VVVGAGDVG (KRAS G13D)
EVVWAVDVV

SEQ ID NO: 84203 - protein, 9 aa, synthetic construct
  source 1..9: note = Seed: VVVGAGDVG (KRAS G13D)
EVVYAADVI

SEQ ID NO: 84204 - protein, 9 aa, synthetic construct
  source 1..9: note = Seed: VVVGAGDVG (KRAS G13D)
EVVYAADVM

SEQ ID NO: 84205 - protein, 9 aa, synthetic construct
  source 1..9: note = Seed: VVVGAGDVG (KRAS G13D)
EVVYAIDVI

SEQ ID NO: 84206 - protein, 9 aa, synthetic construct
  source 1..9: note = Seed: VVVGAGDVG (KRAS G13D)
EVVYAIDVL

SEQ ID NO: 84207 - protein, 9 aa, synthetic construct
  source 1..9: note = Seed: VVVGAGDVG (KRAS G13D)
EVVYAIDVM

SEQ ID NO: 84208 - protein, 9 aa, synthetic construct
  source 1..9: note = Seed: VVVGAGDVG (KRAS G13D)
EVVYAIDVV

SEQ ID NO: 84209 - protein, 9 aa, synthetic construct
  source 1..9: note = Seed: VVVGAGDVG (KRAS G13D)
EVVYALDVA

SEQ ID NO: 84210 - protein, 9 aa, synthetic construct
  source 1..9: note = Seed: VVVGAGDVG (KRAS G13D)
EVVYALDVM

SEQ ID NO: 84211 - protein, 9 aa, synthetic construct
  source 1..9: note = Seed: VVVGAGDVG (KRAS G13D)
EVVYAMDVM

SEQ ID NO: 84212 - protein, 9 aa, synthetic construct
  source 1..9: note = Seed: VVVGAGDVG (KRAS G13D)
EVVYANDVI

SEQ ID NO: 84213 - protein, 9 aa, synthetic construct
  source 1..9: note = Seed: VVVGAGDVG (KRAS G13D)
EVVYANDVL

SEQ ID NO: 84214 - protein, 9 aa, synthetic construct
  source 1..9: note = Seed: VVVGAGDVG (KRAS G13D)
EVVYAVDVA

SEQ ID NO: 84215 - protein, 9 aa, synthetic construct
  source 1..9: note = Seed: VVVGAGDVG (KRAS G13D)
EVVYAVDVM

SEQ ID NO: 84216 - protein, 9 aa, synthetic construct
  source 1..9: note = Seed: VVVGAGDVG (KRAS G13D)
FVVAAADVA

SEQ ID NO: 84217 - protein, 9 aa, synthetic construct
  source 1..9: note = Seed: VVVGAGDVG (KRAS G13D)
FVVAAADVC

SEQ ID NO: 84218 - protein, 9 aa, synthetic construct
  source 1..9: note = Seed: VVVGAGDVG (KRAS G13D)
FVVAAADVD

SEQ ID NO: 84219 - protein, 9 aa, synthetic construct
  source 1..9: note = Seed: VVVGAGDVG (KRAS G13D)
FVVAAADVE

SEQ ID NO: 84220 - protein, 9 aa, synthetic construct
  source 1..9: note = Seed: VVVGAGDVG (KRAS G13D)
FVVAAADVF

SEQ ID NO: 84221 - protein, 9 aa, synthetic construct
  source 1..9: note = Seed: VVVGAGDVG (KRAS G13D)
FVVAAADVG

SEQ ID NO: 84222 - protein, 9 aa, synthetic construct
  source 1..9: note = Seed: VVVGAGDVG (KRAS G13D)
FVVAAADVH

SEQ ID NO: 84223 - protein, 9 aa, synthetic construct
  source 1..9: note = Seed: VVVGAGDVG (KRAS G13D)
FVVAAADVI

SEQ ID NO: 84224 - protein, 9 aa, synthetic construct
  source 1..9: note = Seed: VVVGAGDVG (KRAS G13D)
FVVAAADVK

SEQ ID NO: 84225 - protein, 9 aa, synthetic construct
  source 1..9: note = Seed: VVVGAGDVG (KRAS G13D)
FVVAAADVL

SEQ ID NO: 84226 - protein, 9 aa, synthetic construct
  source 1..9: note = Seed: VVVGAGDVG (KRAS G13D)
FVVAAADVM

SEQ ID NO: 84227 - protein, 9 aa, synthetic construct
  source 1..9: note = Seed: VVVGAGDVG (KRAS G13D)
FVVAAADVN

SEQ ID NO: 84228 - protein, 9 aa, synthetic construct
  source 1..9: note = Seed: VVVGAGDVG (KRAS G13D)
FVVAAADVP

SEQ ID NO: 84229 - protein, 9 aa, synthetic construct
  source 1..9: note = Seed: VVVGAGDVG (KRAS G13D)
FVVAAADVQ

SEQ ID NO: 84230 - protein, 9 aa, synthetic construct
  source 1..9: note = Seed: VVVGAGDVG (KRAS G13D)
FVVAAADVR

SEQ ID NO: 84231 - protein, 9 aa, synthetic construct
  source 1..9: note = Seed: VVVGAGDVG (KRAS G13D)
FVVAAADVS

SEQ ID NO: 84232 - protein, 9 aa, synthetic construct
  source 1..9: note = Seed: VVVGAGDVG (KRAS G13D)
FVVAAADVT

SEQ ID NO: 84233 - protein, 9 aa, synthetic construct
  source 1..9: note = Seed: VVVGAGDVG (KRAS G13D)
FVVAAADVV

SEQ ID NO: 84234 - protein, 9 aa, synthetic construct
  source 1..9: note = Seed: VVVGAGDVG (KRAS G13D)
FVVAAADVW

SEQ ID NO: 84235 - protein, 9 aa, synthetic construct
  source 1..9: note = Seed: VVVGAGDVG (KRAS G13D)
FVVAAADVY

SEQ ID NO: 84236 - protein, 9 aa, synthetic construct
  source 1..9: note = Seed: VVVGAGDVG (KRAS G13D)
FVVAACDVA

SEQ ID NO: 84237 - protein, 9 aa, synthetic construct
  source 1..9: note = Seed: VVVGAGDVG (KRAS G13D)
FVVAACDVH

SEQ ID NO: 84238 - protein, 9 aa, synthetic construct
  source 1..9: note = Seed: VVVGAGDVG (KRAS G13D)
FVVAACDVN

SEQ ID NO: 84239 - protein, 9 aa, synthetic construct
  source 1..9: note = Seed: VVVGAGDVG (KRAS G13D)
FVVAACDVQ

SEQ ID NO: 84240 - protein, 9 aa, synthetic construct
  source 1..9: note = Seed: VVVGAGDVG (KRAS G13D)
FVVAACDVS

SEQ ID NO: 84241 - protein, 9 aa, synthetic construct
  source 1..9: note = Seed: VVVGAGDVG (KRAS G13D)
FVVAACDVT

SEQ ID NO: 84242 - protein, 9 aa, synthetic construct
  source 1..9: note = Seed: VVVGAGDVG (KRAS G13D)
FVVAADDVA

SEQ ID NO: 84243 - protein, 9 aa, synthetic construct
  source 1..9: note = Seed: VVVGAGDVG (KRAS G13D)
FVVAADDVF

SEQ ID NO: 84244 - protein, 9 aa, synthetic construct
  source 1..9: note = Seed: VVVGAGDVG (KRAS G13D)
FVVAADDVG

SEQ ID NO: 84245 - protein, 9 aa, synthetic construct
  source 1..9: note = Seed: VVVGAGDVG (KRAS G13D)
FVVAADDVH

SEQ ID NO: 84246 - protein, 9 aa, synthetic construct
  source 1..9: note = Seed: VVVGAGDVG (KRAS G13D)
FVVAADDVI

SEQ ID NO: 84247 - protein, 9 aa, synthetic construct
  source 1..9: note = Seed: VVVGAGDVG (KRAS G13D)
FVVAADDVK

SEQ ID NO: 84248 - protein, 9 aa, synthetic construct
  source 1..9: note = Seed: VVVGAGDVG (KRAS G13D)
FVVAADDVL

SEQ ID NO: 84249 - protein, 9 aa, synthetic construct
  source 1..9: note = Seed: VVVGAGDVG (KRAS G13D)
FVVAADDVM

SEQ ID NO: 84250 - protein, 9 aa, synthetic construct
  source 1..9: note = Seed: VVVGAGDVG (KRAS G13D)
FVVAADDVN

SEQ ID NO: 84251 - protein, 9 aa, synthetic construct
  source 1..9: note = Seed: VVVGAGDVG (KRAS G13D)
FVVAADDVP

SEQ ID NO: 84252 - protein, 9 aa, synthetic construct
  source 1..9: note = Seed: VVVGAGDVG (KRAS G13D)
FVVAADDVQ

SEQ ID NO: 84253 - protein, 9 aa, synthetic construct
  source 1..9: note = Seed: VVVGAGDVG (KRAS G13D)
FVVAADDVR

SEQ ID NO: 84254 - protein, 9 aa, synthetic construct
  source 1..9: note = Seed: VVVGAGDVG (KRAS G13D)
FVVAADDVS

SEQ ID NO: 84255 - protein, 9 aa, synthetic construct
  source 1..9: note = Seed: VVVGAGDVG (KRAS G13D)
FVVAADDVT

SEQ ID NO: 84256 - protein, 9 aa, synthetic construct
  source 1..9: note = Seed: VVVGAGDVG (KRAS G13D)
FVVAADDVV

SEQ ID NO: 84257 - protein, 9 aa, synthetic construct
  source 1..9: note = Seed: VVVGAGDVG (KRAS G13D)
FVVAADDVY

SEQ ID NO: 84258 - protein, 9 aa, synthetic construct
  source 1..9: note = Seed: VVVGAGDVG (KRAS G13D)
FVVAAEDVA

SEQ ID NO: 84259 - protein, 9 aa, synthetic construct
  source 1..9: note = Seed: VVVGAGDVG (KRAS G13D)
FVVAAEDVE

SEQ ID NO: 84260 - protein, 9 aa, synthetic construct
  source 1..9: note = Seed: VVVGAGDVG (KRAS G13D)
FVVAAEDVF

SEQ ID NO: 84261 - protein, 9 aa, synthetic construct
  source 1..9: note = Seed: VVVGAGDVG (KRAS G13D)
FVVAAEDVG

SEQ ID NO: 84262 - protein, 9 aa, synthetic construct
  source 1..9: note = Seed: VVVGAGDVG (KRAS G13D)
FVVAAEDVH

SEQ ID NO: 84263 - protein, 9 aa, synthetic construct
  source 1..9: note = Seed: VVVGAGDVG (KRAS G13D)
FVVAAEDVI

SEQ ID NO: 84264 - protein, 9 aa, synthetic construct
  source 1..9: note = Seed: VVVGAGDVG (KRAS G13D)
FVVAAEDVL

SEQ ID NO: 84265 - protein, 9 aa, synthetic construct
  source 1..9: note = Seed: VVVGAGDVG (KRAS G13D)
FVVAAEDVM

SEQ ID NO: 84266 - protein, 9 aa, synthetic construct
  source 1..9: note = Seed: VVVGAGDVG (KRAS G13D)
FVVAAEDVN

SEQ ID NO: 84267 - protein, 9 aa, synthetic construct
  source 1..9: note = Seed: VVVGAGDVG (KRAS G13D)
FVVAAEDVP

SEQ ID NO: 84268 - protein, 9 aa, synthetic construct
  source 1..9: note = Seed: VVVGAGDVG (KRAS G13D)
FVVAAEDVQ

SEQ ID NO: 84269 - protein, 9 aa, synthetic construct
  source 1..9: note = Seed: VVVGAGDVG (KRAS G13D)
FVVAAEDVS

SEQ ID NO: 84270 - protein, 9 aa, synthetic construct
  source 1..9: note = Seed: VVVGAGDVG (KRAS G13D)
FVVAAEDVT

SEQ ID NO: 84271 - protein, 9 aa, synthetic construct
  source 1..9: note = Seed: VVVGAGDVG (KRAS G13D)
FVVAAEDVV

SEQ ID NO: 84272 - protein, 9 aa, synthetic construct
  source 1..9: note = Seed: VVVGAGDVG (KRAS G13D)
FVVAAEDVY

SEQ ID NO: 84273 - protein, 9 aa, synthetic construct
  source 1..9: note = Seed: VVVGAGDVG (KRAS G13D)
FVVAAFDVA

SEQ ID NO: 84274 - protein, 9 aa, synthetic construct
  source 1..9: note = Seed: VVVGAGDVG (KRAS G13D)
FVVAAFDVM

SEQ ID NO: 84275 - protein, 9 aa, synthetic construct
  source 1..9: note = Seed: VVVGAGDVG (KRAS G13D)
FVVAAFDVN

SEQ ID NO: 84276 - protein, 9 aa, synthetic construct
  source 1..9: note = Seed: VVVGAGDVG (KRAS G13D)
FVVAAFDVS

SEQ ID NO: 84277 - protein, 9 aa, synthetic construct
  source 1..9: note = Seed: VVVGAGDVG (KRAS G13D)
FVVAAGDVA

SEQ ID NO: 84278 - protein, 9 aa, synthetic construct
  source 1..9: note = Seed: VVVGAGDVG (KRAS G13D)
FVVAAGDVC

SEQ ID NO: 84279 - protein, 9 aa, synthetic construct
  source 1..9: note = Seed: VVVGAGDVG (KRAS G13D)
FVVAAGDVD

SEQ ID NO: 84280 - protein, 9 aa, synthetic construct
  source 1..9: note = Seed: VVVGAGDVG (KRAS G13D)
FVVAAGDVE

SEQ ID NO: 84281 - protein, 9 aa, synthetic construct
  source 1..9: note = Seed: VVVGAGDVG (KRAS G13D)
FVVAAGDVF

SEQ ID NO: 84282 - protein, 9 aa, synthetic construct
  source 1..9: note = Seed: VVVGAGDVG (KRAS G13D)
FVVAAGDVG

SEQ ID NO: 84283 - protein, 9 aa, synthetic construct
  source 1..9: note = Seed: VVVGAGDVG (KRAS G13D)
FVVAAGDVH

SEQ ID NO: 84284 - protein, 9 aa, synthetic construct
  source 1..9: note = Seed: VVVGAGDVG (KRAS G13D)
FVVAAGDVI

SEQ ID NO: 84285 - protein, 9 aa, synthetic construct
  source 1..9: note = Seed: VVVGAGDVG (KRAS G13D)
FVVAAGDVK

SEQ ID NO: 84286 - protein, 9 aa, synthetic construct
  source 1..9: note = Seed: VVVGAGDVG (KRAS G13D)
FVVAAGDVL

SEQ ID NO: 84287 - protein, 9 aa, synthetic construct
  source 1..9: note = Seed: VVVGAGDVG (KRAS G13D)
FVVAAGDVM

SEQ ID NO: 84288 - protein, 9 aa, synthetic construct
  source 1..9: note = Seed: VVVGAGDVG (KRAS G13D)
FVVAAGDVN

SEQ ID NO: 84289 - protein, 9 aa, synthetic construct
  source 1..9: note = Seed: VVVGAGDVG (KRAS G13D)
FVVAAGDVP

SEQ ID NO: 84290 - protein, 9 aa, synthetic construct
  source 1..9: note = Seed: VVVGAGDVG (KRAS G13D)
FVVAAGDVQ

SEQ ID NO: 84291 - protein, 9 aa, synthetic construct
  source 1..9: note = Seed: VVVGAGDVG (KRAS G13D)
FVVAAGDVR

SEQ ID NO: 84292 - protein, 9 aa, synthetic construct
  source 1..9: note = Seed: VVVGAGDVG (KRAS G13D)
FVVAAGDVS

SEQ ID NO: 84293 - protein, 9 aa, synthetic construct
  source 1..9: note = Seed: VVVGAGDVG (KRAS G13D)
FVVAAGDVT

SEQ ID NO: 84294 - protein, 9 aa, synthetic construct
  source 1..9: note = Seed: VVVGAGDVG (KRAS G13D)
FVVAAGDVV

SEQ ID NO: 84295 - protein, 9 aa, synthetic construct
  source 1..9: note = Seed: VVVGAGDVG (KRAS G13D)
FVVAAGDVW

SEQ ID NO: 84296 - protein, 9 aa, synthetic construct
  source 1..9: note = Seed: VVVGAGDVG (KRAS G13D)
FVVAAGDVY

SEQ ID NO: 84297 - protein, 9 aa, synthetic construct
  source 1..9: note = Seed: VVVGAGDVG (KRAS G13D)
FVVAAHDVA

SEQ ID NO: 84298 - protein, 9 aa, synthetic construct
  source 1..9: note = Seed: VVVGAGDVG (KRAS G13D)
FVVAAHDVC

SEQ ID NO: 84299 - protein, 9 aa, synthetic construct
  source 1..9: note = Seed: VVVGAGDVG (KRAS G13D)
FVVAAHDVD

SEQ ID NO: 84300 - protein, 9 aa, synthetic construct
  source 1..9: note = Seed: VVVGAGDVG (KRAS G13D)
FVVAAHDVE

SEQ ID NO: 84301 - protein, 9 aa, synthetic construct
  source 1..9: note = Seed: VVVGAGDVG (KRAS G13D)
FVVAAHDVG

SEQ ID NO: 84302 - protein, 9 aa, synthetic construct
  source 1..9: note = Seed: VVVGAGDVG (KRAS G13D)
FVVAAHDVH

SEQ ID NO: 84303 - protein, 9 aa, synthetic construct
  source 1..9: note = Seed: VVVGAGDVG (KRAS G13D)
FVVAAHDVI

SEQ ID NO: 84304 - protein, 9 aa, synthetic construct
  source 1..9: note = Seed: VVVGAGDVG (KRAS G13D)
FVVAAHDVL

SEQ ID NO: 84305 - protein, 9 aa, synthetic construct
  source 1..9: note = Seed: VVVGAGDVG (KRAS G13D)
FVVAAHDVM

SEQ ID NO: 84306 - protein, 9 aa, synthetic construct
  source 1..9: note = Seed: VVVGAGDVG (KRAS G13D)
FVVAAHDVN

SEQ ID NO: 84307 - protein, 9 aa, synthetic construct
  source 1..9: note = Seed: VVVGAGDVG (KRAS G13D)
FVVAAHDVQ

SEQ ID NO: 84308 - protein, 9 aa, synthetic construct
  source 1..9: note = Seed: VVVGAGDVG (KRAS G13D)
FVVAAHDVS

SEQ ID NO: 84309 - protein, 9 aa, synthetic construct
  source 1..9: note = Seed: VVVGAGDVG (KRAS G13D)
FVVAAHDVT

SEQ ID NO: 84310 - protein, 9 aa, synthetic construct
  source 1..9: note = Seed: VVVGAGDVG (KRAS G13D)
FVVAAHDVV

SEQ ID NO: 84311 - protein, 9 aa, synthetic construct
  source 1..9: note = Seed: VVVGAGDVG (KRAS G13D)
FVVAAHDVY

SEQ ID NO: 84312 - protein, 9 aa, synthetic construct
  source 1..9: note = Seed: VVVGAGDVG (KRAS G13D)
FVVAAIDVA

SEQ ID NO: 84313 - protein, 9 aa, synthetic construct
  source 1..9: note = Seed: VVVGAGDVG (KRAS G13D)
FVVAAIDVC

SEQ ID NO: 84314 - protein, 9 aa, synthetic construct
  source 1..9: note = Seed: VVVGAGDVG (KRAS G13D)
FVVAAIDVD

SEQ ID NO: 84315 - protein, 9 aa, synthetic construct
  source 1..9: note = Seed: VVVGAGDVG (KRAS G13D)
FVVAAIDVE

SEQ ID NO: 84316 - protein, 9 aa, synthetic construct
  source 1..9: note = Seed: VVVGAGDVG (KRAS G13D)
FVVAAIDVF

SEQ ID NO: 84317 - protein, 9 aa, synthetic construct
  source 1..9: note = Seed: VVVGAGDVG (KRAS G13D)
FVVAAIDVG

SEQ ID NO: 84318 - protein, 9 aa, synthetic construct
  source 1..9: note = Seed: VVVGAGDVG (KRAS G13D)
FVVAAIDVH

SEQ ID NO: 84319 - protein, 9 aa, synthetic construct
  source 1..9: note = Seed: VVVGAGDVG (KRAS G13D)
FVVAAIDVI

SEQ ID NO: 84320 - protein, 9 aa, synthetic construct
  source 1..9: note = Seed: VVVGAGDVG (KRAS G13D)
FVVAAIDVK

SEQ ID NO: 84321 - protein, 9 aa, synthetic construct
  source 1..9: note = Seed: VVVGAGDVG (KRAS G13D)
FVVAAIDVL

SEQ ID NO: 84322 - protein, 9 aa, synthetic construct
  source 1..9: note = Seed: VVVGAGDVG (KRAS G13D)
FVVAAIDVM

SEQ ID NO: 84323 - protein, 9 aa, synthetic construct
  source 1..9: note = Seed: VVVGAGDVG (KRAS G13D)
FVVAAIDVN

SEQ ID NO: 84324 - protein, 9 aa, synthetic construct
  source 1..9: note = Seed: VVVGAGDVG (KRAS G13D)
FVVAAIDVP

SEQ ID NO: 84325 - protein, 9 aa, synthetic construct
  source 1..9: note = Seed: VVVGAGDVG (KRAS G13D)
FVVAAIDVQ

SEQ ID NO: 84326 - protein, 9 aa, synthetic construct
  source 1..9: note = Seed: VVVGAGDVG (KRAS G13D)
FVVAAIDVR

SEQ ID NO: 84327 - protein, 9 aa, synthetic construct
  source 1..9: note = Seed: VVVGAGDVG (KRAS G13D)
FVVAAIDVS

SEQ ID NO: 84328 - protein, 9 aa, synthetic construct
  source 1..9: note = Seed: VVVGAGDVG (KRAS G13D)
FVVAAIDVT

SEQ ID NO: 84329 - protein, 9 aa, synthetic construct
  source 1..9: note = Seed: VVVGAGDVG (KRAS G13D)
FVVAAIDVV

SEQ ID NO: 84330 - protein, 9 aa, synthetic construct
  source 1..9: note = Seed: VVVGAGDVG (KRAS G13D)
FVVAAIDVY

SEQ ID NO: 84331 - protein, 9 aa, synthetic construct
  source 1..9: note = Seed: VVVGAGDVG (KRAS G13D)
FVVAAKDVA

SEQ ID NO: 84332 - protein, 9 aa, synthetic construct
  source 1..9: note = Seed: VVVGAGDVG (KRAS G13D)
FVVAAKDVF

SEQ ID NO: 84333 - protein, 9 aa, synthetic construct
  source 1..9: note = Seed: VVVGAGDVG (KRAS G13D)
FVVAAKDVH

SEQ ID NO: 84334 - protein, 9 aa, synthetic construct
  source 1..9: note = Seed: VVVGAGDVG (KRAS G13D)
FVVAAKDVI

SEQ ID NO: 84335 - protein, 9 aa, synthetic construct
  source 1..9: note = Seed: VVVGAGDVG (KRAS G13D)
FVVAAKDVL

SEQ ID NO: 84336 - protein, 9 aa, synthetic construct
  source 1..9: note = Seed: VVVGAGDVG (KRAS G13D)
FVVAAKDVM

SEQ ID NO: 84337 - protein, 9 aa, synthetic construct
  source 1..9: note = Seed: VVVGAGDVG (KRAS G13D)
FVVAAKDVN

SEQ ID NO: 84338 - protein, 9 aa, synthetic construct
  source 1..9: note = Seed: VVVGAGDVG (KRAS G13D)
FVVAAKDVQ

SEQ ID NO: 84339 - protein, 9 aa, synthetic construct
  source 1..9: note = Seed: VVVGAGDVG (KRAS G13D)
FVVAAKDVS

SEQ ID NO: 84340 - protein, 9 aa, synthetic construct
  source 1..9: note = Seed: VVVGAGDVG (KRAS G13D)
FVVAAKDVT

SEQ ID NO: 84341 - protein, 9 aa, synthetic construct
  source 1..9: note = Seed: VVVGAGDVG (KRAS G13D)
FVVAAKDVV

SEQ ID NO: 84342 - protein, 9 aa, synthetic construct
  source 1..9: note = Seed: VVVGAGDVG (KRAS G13D)
FVVAAKDVY

SEQ ID NO: 84343 - protein, 9 aa, synthetic construct
  source 1..9: note = Seed: VVVGAGDVG (KRAS G13D)
FVVAALDVA

SEQ ID NO: 84344 - protein, 9 aa, synthetic construct
  source 1..9: note = Seed: VVVGAGDVG (KRAS G13D)
FVVAALDVC

SEQ ID NO: 84345 - protein, 9 aa, synthetic construct
  source 1..9: note = Seed: VVVGAGDVG (KRAS G13D)
FVVAALDVD

SEQ ID NO: 84346 - protein, 9 aa, synthetic construct
  source 1..9: note = Seed: VVVGAGDVG (KRAS G13D)
FVVAALDVG

SEQ ID NO: 84347 - protein, 9 aa, synthetic construct
  source 1..9: note = Seed: VVVGAGDVG (KRAS G13D)
FVVAALDVS

SEQ ID NO: 84348 - protein, 9 aa, synthetic construct
  source 1..9: note = Seed: VVVGAGDVG (KRAS G13D)
FVVAALDVT

SEQ ID NO: 84349 - protein, 9 aa, synthetic construct
  source 1..9: note = Seed: VVVGAGDVG (KRAS G13D)
FVVAAMDVA

SEQ ID NO: 84350 - protein, 9 aa, synthetic construct
  source 1..9: note = Seed: VVVGAGDVG (KRAS G13D)
FVVAAMDVC

SEQ ID NO: 84351 - protein, 9 aa, synthetic construct
  source 1..9: note = Seed: VVVGAGDVG (KRAS G13D)
FVVAAMDVD

SEQ ID NO: 84352 - protein, 9 aa, synthetic construct
  source 1..9: note = Seed: VVVGAGDVG (KRAS G13D)
FVVAAMDVG

SEQ ID NO: 84353 - protein, 9 aa, synthetic construct
  source 1..9: note = Seed: VVVGAGDVG (KRAS G13D)
FVVAAMDVN

SEQ ID NO: 84354 - protein, 9 aa, synthetic construct
  source 1..9: note = Seed: VVVGAGDVG (KRAS G13D)
FVVAAMDVS

SEQ ID NO: 84355 - protein, 9 aa, synthetic construct
  source 1..9: note = Seed: VVVGAGDVG (KRAS G13D)
FVVAANDVA

SEQ ID NO: 84356 - protein, 9 aa, synthetic construct
  source 1..9: note = Seed: VVVGAGDVG (KRAS G13D)
FVVAANDVC

SEQ ID NO: 84357 - protein, 9 aa, synthetic construct
  source 1..9: note = Seed: VVVGAGDVG (KRAS G13D)
FVVAANDVD

SEQ ID NO: 84358 - protein, 9 aa, synthetic construct
  source 1..9: note = Seed: VVVGAGDVG (KRAS G13D)
FVVAANDVE

SEQ ID NO: 84359 - protein, 9 aa, synthetic construct
  source 1..9: note = Seed: VVVGAGDVG (KRAS G13D)
FVVAANDVF

SEQ ID NO: 84360 - protein, 9 aa, synthetic construct
  source 1..9: note = Seed: VVVGAGDVG (KRAS G13D)
FVVAANDVG

SEQ ID NO: 84361 - protein, 9 aa, synthetic construct
  source 1..9: note = Seed: VVVGAGDVG (KRAS G13D)
FVVAANDVH

SEQ ID NO: 84362 - protein, 9 aa, synthetic construct
  source 1..9: note = Seed: VVVGAGDVG (KRAS G13D)
FVVAANDVI

SEQ ID NO: 84363 - protein, 9 aa, synthetic construct
  source 1..9: note = Seed: VVVGAGDVG (KRAS G13D)
FVVAANDVK

SEQ ID NO: 84364 - protein, 9 aa, synthetic construct
  source 1..9: note = Seed: VVVGAGDVG (KRAS G13D)
FVVAANDVL

SEQ ID NO: 84365 - protein, 9 aa, synthetic construct
  source 1..9: note = Seed: VVVGAGDVG (KRAS G13D)
FVVAANDVM

SEQ ID NO: 84366 - protein, 9 aa, synthetic construct
  source 1..9: note = Seed: VVVGAGDVG (KRAS G13D)
FVVAANDVN

SEQ ID NO: 84367 - protein, 9 aa, synthetic construct
  source 1..9: note = Seed: VVVGAGDVG (KRAS G13D)
FVVAANDVP

SEQ ID NO: 84368 - protein, 9 aa, synthetic construct
  source 1..9: note = Seed: VVVGAGDVG (KRAS G13D)
FVVAANDVQ

SEQ ID NO: 84369 - protein, 9 aa, synthetic construct
  source 1..9: note = Seed: VVVGAGDVG (KRAS G13D)
FVVAANDVR

SEQ ID NO: 84370 - protein, 9 aa, synthetic construct
  source 1..9: note = Seed: VVVGAGDVG (KRAS G13D)
FVVAANDVS

SEQ ID NO: 84371 - protein, 9 aa, synthetic construct
  source 1..9: note = Seed: VVVGAGDVG (KRAS G13D)
FVVAANDVT

SEQ ID NO: 84372 - protein, 9 aa, synthetic construct
  source 1..9: note = Seed: VVVGAGDVG (KRAS G13D)
FVVAANDVV

SEQ ID NO: 84373 - protein, 9 aa, synthetic construct
  source 1..9: note = Seed: VVVGAGDVG (KRAS G13D)
FVVAANDVW

SEQ ID NO: 84374 - protein, 9 aa, synthetic construct
  source 1..9: note = Seed: VVVGAGDVG (KRAS G13D)
FVVAANDVY

SEQ ID NO: 84375 - protein, 9 aa, synthetic construct
  source 1..9: note = Seed: VVVGAGDVG (KRAS G13D)
FVVAAPDVA

SEQ ID NO: 84376 - protein, 9 aa, synthetic construct
  source 1..9: note = Seed: VVVGAGDVG (KRAS G13D)
FVVAAPDVC

SEQ ID NO: 84377 - protein, 9 aa, synthetic construct
  source 1..9: note = Seed: VVVGAGDVG (KRAS G13D)
FVVAAPDVD

SEQ ID NO: 84378 - protein, 9 aa, synthetic construct
  source 1..9: note = Seed: VVVGAGDVG (KRAS G13D)
FVVAAPDVE

SEQ ID NO: 84379 - protein, 9 aa, synthetic construct
  source 1..9: note = Seed: VVVGAGDVG (KRAS G13D)
FVVAAPDVF

SEQ ID NO: 84380 - protein, 9 aa, synthetic construct
  source 1..9: note = Seed: VVVGAGDVG (KRAS G13D)
FVVAAPDVG

SEQ ID NO: 84381 - protein, 9 aa, synthetic construct
  source 1..9: note = Seed: VVVGAGDVG (KRAS G13D)
FVVAAPDVH

SEQ ID NO: 84382 - protein, 9 aa, synthetic construct
  source 1..9: note = Seed: VVVGAGDVG (KRAS G13D)
FVVAAPDVI

SEQ ID NO: 84383 - protein, 9 aa, synthetic construct
  source 1..9: note = Seed: VVVGAGDVG (KRAS G13D)
FVVAAPDVK

SEQ ID NO: 84384 - protein, 9 aa, synthetic construct
  source 1..9: note = Seed: VVVGAGDVG (KRAS G13D)
FVVAAPDVL

SEQ ID NO: 84385 - protein, 9 aa, synthetic construct
  source 1..9: note = Seed: VVVGAGDVG (KRAS G13D)
FVVAAPDVM

SEQ ID NO: 84386 - protein, 9 aa, synthetic construct
  source 1..9: note = Seed: VVVGAGDVG (KRAS G13D)
FVVAAPDVN

SEQ ID NO: 84387 - protein, 9 aa, synthetic construct
  source 1..9: note = Seed: VVVGAGDVG (KRAS G13D)
FVVAAPDVP

SEQ ID NO: 84388 - protein, 9 aa, synthetic construct
  source 1..9: note = Seed: VVVGAGDVG (KRAS G13D)
FVVAAPDVQ

SEQ ID NO: 84389 - protein, 9 aa, synthetic construct
  source 1..9: note = Seed: VVVGAGDVG (KRAS G13D)
FVVAAPDVR

SEQ ID NO: 84390 - protein, 9 aa, synthetic construct
  source 1..9: note = Seed: VVVGAGDVG (KRAS G13D)
FVVAAPDVS

SEQ ID NO: 84391 - protein, 9 aa, synthetic construct
  source 1..9: note = Seed: VVVGAGDVG (KRAS G13D)
FVVAAPDVT

SEQ ID NO: 84392 - protein, 9 aa, synthetic construct
  source 1..9: note = Seed: VVVGAGDVG (KRAS G13D)
FVVAAPDVV

SEQ ID NO: 84393 - protein, 9 aa, synthetic construct
  source 1..9: note = Seed: VVVGAGDVG (KRAS G13D)
FVVAAPDVW

SEQ ID NO: 84394 - protein, 9 aa, synthetic construct
  source 1..9: note = Seed: VVVGAGDVG (KRAS G13D)
FVVAAPDVY

SEQ ID NO: 84395 - protein, 9 aa, synthetic construct
  source 1..9: note = Seed: VVVGAGDVG (KRAS G13D)
FVVAAQDVA

SEQ ID NO: 84396 - protein, 9 aa, synthetic construct
  source 1..9: note = Seed: VVVGAGDVG (KRAS G13D)
FVVAAQDVC

SEQ ID NO: 84397 - protein, 9 aa, synthetic construct
  source 1..9: note = Seed: VVVGAGDVG (KRAS G13D)
FVVAAQDVD

SEQ ID NO: 84398 - protein, 9 aa, synthetic construct
  source 1..9: note = Seed: VVVGAGDVG (KRAS G13D)
FVVAAQDVG

SEQ ID NO: 84399 - protein, 9 aa, synthetic construct
  source 1..9: note = Seed: VVVGAGDVG (KRAS G13D)
FVVAAQDVH

SEQ ID NO: 84400 - protein, 9 aa, synthetic construct
  source 1..9: note = Seed: VVVGAGDVG (KRAS G13D)
FVVAAQDVI

SEQ ID NO: 84401 - protein, 9 aa, synthetic construct
  source 1..9: note = Seed: VVVGAGDVG (KRAS G13D)
FVVAAQDVL

SEQ ID NO: 84402 - protein, 9 aa, synthetic construct
  source 1..9: note = Seed: VVVGAGDVG (KRAS G13D)
FVVAAQDVM

SEQ ID NO: 84403 - protein, 9 aa, synthetic construct
  source 1..9: note = Seed: VVVGAGDVG (KRAS G13D)
FVVAAQDVN

SEQ ID NO: 84404 - protein, 9 aa, synthetic construct
  source 1..9: note = Seed: VVVGAGDVG (KRAS G13D)
FVVAAQDVQ

SEQ ID NO: 84405 - protein, 9 aa, synthetic construct
  source 1..9: note = Seed: VVVGAGDVG (KRAS G13D)
FVVAAQDVS

SEQ ID NO: 84406 - protein, 9 aa, synthetic construct
  source 1..9: note = Seed: VVVGAGDVG (KRAS G13D)
FVVAAQDVT

SEQ ID NO: 84407 - protein, 9 aa, synthetic construct
  source 1..9: note = Seed: VVVGAGDVG (KRAS G13D)
FVVAAQDVV

SEQ ID NO: 84408 - protein, 9 aa, synthetic construct
  source 1..9: note = Seed: VVVGAGDVG (KRAS G13D)
FVVAARDVA

SEQ ID NO: 84409 - protein, 9 aa, synthetic construct
  source 1..9: note = Seed: VVVGAGDVG (KRAS G13D)
FVVAARDVD

SEQ ID NO: 84410 - protein, 9 aa, synthetic construct
  source 1..9: note = Seed: VVVGAGDVG (KRAS G13D)
FVVAARDVE

SEQ ID NO: 84411 - protein, 9 aa, synthetic construct
  source 1..9: note = Seed: VVVGAGDVG (KRAS G13D)
FVVAARDVG

SEQ ID NO: 84412 - protein, 9 aa, synthetic construct
  source 1..9: note = Seed: VVVGAGDVG (KRAS G13D)
FVVAARDVI

SEQ ID NO: 84413 - protein, 9 aa, synthetic construct
  source 1..9: note = Seed: VVVGAGDVG (KRAS G13D)
FVVAARDVL

SEQ ID NO: 84414 - protein, 9 aa, synthetic construct
  source 1..9: note = Seed: VVVGAGDVG (KRAS G13D)
FVVAARDVM

SEQ ID NO: 84415 - protein, 9 aa, synthetic construct
  source 1..9: note = Seed: VVVGAGDVG (KRAS G13D)
FVVAARDVN

SEQ ID NO: 84416 - protein, 9 aa, synthetic construct
  source 1..9: note = Seed: VVVGAGDVG (KRAS G13D)
FVVAARDVQ

SEQ ID NO: 84417 - protein, 9 aa, synthetic construct
  source 1..9: note = Seed: VVVGAGDVG (KRAS G13D)
FVVAARDVS

SEQ ID NO: 84418 - protein, 9 aa, synthetic construct
  source 1..9: note = Seed: VVVGAGDVG (KRAS G13D)
FVVAARDVT

SEQ ID NO: 84419 - protein, 9 aa, synthetic construct
  source 1..9: note = Seed: VVVGAGDVG (KRAS G13D)
FVVAARDVV

SEQ ID NO: 84420 - protein, 9 aa, synthetic construct
  source 1..9: note = Seed: VVVGAGDVG (KRAS G13D)
FVVAASDVA

SEQ ID NO: 84421 - protein, 9 aa, synthetic construct
  source 1..9: note = Seed: VVVGAGDVG (KRAS G13D)
FVVAASDVC

SEQ ID NO: 84422 - protein, 9 aa, synthetic construct
  source 1..9: note = Seed: VVVGAGDVG (KRAS G13D)
FVVAASDVD

SEQ ID NO: 84423 - protein, 9 aa, synthetic construct
  source 1..9: note = Seed: VVVGAGDVG (KRAS G13D)
FVVAASDVE

SEQ ID NO: 84424 - protein, 9 aa, synthetic construct
  source 1..9: note = Seed: VVVGAGDVG (KRAS G13D)
FVVAASDVF

SEQ ID NO: 84425 - protein, 9 aa, synthetic construct
  source 1..9: note = Seed: VVVGAGDVG (KRAS G13D)
FVVAASDVG

SEQ ID NO: 84426 - protein, 9 aa, synthetic construct
  source 1..9: note = Seed: VVVGAGDVG (KRAS G13D)
FVVAASDVH

SEQ ID NO: 84427 - protein, 9 aa, synthetic construct
  source 1..9: note = Seed: VVVGAGDVG (KRAS G13D)
FVVAASDVI

SEQ ID NO: 84428 - protein, 9 aa, synthetic construct
  source 1..9: note = Seed: VVVGAGDVG (KRAS G13D)
FVVAASDVK

SEQ ID NO: 84429 - protein, 9 aa, synthetic construct
  source 1..9: note = Seed: VVVGAGDVG (KRAS G13D)
FVVAASDVL

SEQ ID NO: 84430 - protein, 9 aa, synthetic construct
  source 1..9: note = Seed: VVVGAGDVG (KRAS G13D)
FVVAASDVM

SEQ ID NO: 84431 - protein, 9 aa, synthetic construct
  source 1..9: note = Seed: VVVGAGDVG (KRAS G13D)
FVVAASDVN

SEQ ID NO: 84432 - protein, 9 aa, synthetic construct
  source 1..9: note = Seed: VVVGAGDVG (KRAS G13D)
FVVAASDVP

SEQ ID NO: 84433 - protein, 9 aa, synthetic construct
  source 1..9: note = Seed: VVVGAGDVG (KRAS G13D)
FVVAASDVQ

SEQ ID NO: 84434 - protein, 9 aa, synthetic construct
  source 1..9: note = Seed: VVVGAGDVG (KRAS G13D)
FVVAASDVR

SEQ ID NO: 84435 - protein, 9 aa, synthetic construct
  source 1..9: note = Seed: VVVGAGDVG (KRAS G13D)
FVVAASDVS

SEQ ID NO: 84436 - protein, 9 aa, synthetic construct
  source 1..9: note = Seed: VVVGAGDVG (KRAS G13D)
FVVAASDVT

SEQ ID NO: 84437 - protein, 9 aa, synthetic construct
  source 1..9: note = Seed: VVVGAGDVG (KRAS G13D)
FVVAASDVV

SEQ ID NO: 84438 - protein, 9 aa, synthetic construct
  source 1..9: note = Seed: VVVGAGDVG (KRAS G13D)
FVVAASDVW

SEQ ID NO: 84439 - protein, 9 aa, synthetic construct
  source 1..9: note = Seed: VVVGAGDVG (KRAS G13D)
FVVAASDVY

SEQ ID NO: 84440 - protein, 9 aa, synthetic construct
  source 1..9: note = Seed: VVVGAGDVG (KRAS G13D)
FVVAATDVA

SEQ ID NO: 84441 - protein, 9 aa, synthetic construct
  source 1..9: note = Seed: VVVGAGDVG (KRAS G13D)
FVVAATDVC

SEQ ID NO: 84442 - protein, 9 aa, synthetic construct
  source 1..9: note = Seed: VVVGAGDVG (KRAS G13D)
FVVAATDVD

SEQ ID NO: 84443 - protein, 9 aa, synthetic construct
  source 1..9: note = Seed: VVVGAGDVG (KRAS G13D)
FVVAATDVE

SEQ ID NO: 84444 - protein, 9 aa, synthetic construct
  source 1..9: note = Seed: VVVGAGDVG (KRAS G13D)
FVVAATDVF

SEQ ID NO: 84445 - protein, 9 aa, synthetic construct
  source 1..9: note = Seed: VVVGAGDVG (KRAS G13D)
FVVAATDVG

SEQ ID NO: 84446 - protein, 9 aa, synthetic construct
  source 1..9: note = Seed: VVVGAGDVG (KRAS G13D)
FVVAATDVH

SEQ ID NO: 84447 - protein, 9 aa, synthetic construct
  source 1..9: note = Seed: VVVGAGDVG (KRAS G13D)
FVVAATDVI

SEQ ID NO: 84448 - protein, 9 aa, synthetic construct
  source 1..9: note = Seed: VVVGAGDVG (KRAS G13D)
FVVAATDVK

SEQ ID NO: 84449 - protein, 9 aa, synthetic construct
  source 1..9: note = Seed: VVVGAGDVG (KRAS G13D)
FVVAATDVL

SEQ ID NO: 84450 - protein, 9 aa, synthetic construct
  source 1..9: note = Seed: VVVGAGDVG (KRAS G13D)
FVVAATDVM

SEQ ID NO: 84451 - protein, 9 aa, synthetic construct
  source 1..9: note = Seed: VVVGAGDVG (KRAS G13D)
FVVAATDVN

SEQ ID NO: 84452 - protein, 9 aa, synthetic construct
  source 1..9: note = Seed: VVVGAGDVG (KRAS G13D)
FVVAATDVP

SEQ ID NO: 84453 - protein, 9 aa, synthetic construct
  source 1..9: note = Seed: VVVGAGDVG (KRAS G13D)
FVVAATDVQ

SEQ ID NO: 84454 - protein, 9 aa, synthetic construct
  source 1..9: note = Seed: VVVGAGDVG (KRAS G13D)
FVVAATDVR

SEQ ID NO: 84455 - protein, 9 aa, synthetic construct
  source 1..9: note = Seed: VVVGAGDVG (KRAS G13D)
FVVAATDVS

SEQ ID NO: 84456 - protein, 9 aa, synthetic construct
  source 1..9: note = Seed: VVVGAGDVG (KRAS G13D)
FVVAATDVT

SEQ ID NO: 84457 - protein, 9 aa, synthetic construct
  source 1..9: note = Seed: VVVGAGDVG (KRAS G13D)
FVVAATDVV

SEQ ID NO: 84458 - protein, 9 aa, synthetic construct
  source 1..9: note = Seed: VVVGAGDVG (KRAS G13D)
FVVAATDVW

SEQ ID NO: 84459 - protein, 9 aa, synthetic construct
  source 1..9: note = Seed: VVVGAGDVG (KRAS G13D)
FVVAATDVY

SEQ ID NO: 84460 - protein, 9 aa, synthetic construct
  source 1..9: note = Seed: VVVGAGDVG (KRAS G13D)
FVVAAVDVA

SEQ ID NO: 84461 - protein, 9 aa, synthetic construct
  source 1..9: note = Seed: VVVGAGDVG (KRAS G13D)
FVVAAVDVC

SEQ ID NO: 84462 - protein, 9 aa, synthetic construct
  source 1..9: note = Seed: VVVGAGDVG (KRAS G13D)
FVVAAVDVD

SEQ ID NO: 84463 - protein, 9 aa, synthetic construct
  source 1..9: note = Seed: VVVGAGDVG (KRAS G13D)
FVVAAVDVE

SEQ ID NO: 84464 - protein, 9 aa, synthetic construct
  source 1..9: note = Seed: VVVGAGDVG (KRAS G13D)
FVVAAVDVF

SEQ ID NO: 84465 - protein, 9 aa, synthetic construct
  source 1..9: note = Seed: VVVGAGDVG (KRAS G13D)
FVVAAVDVG

SEQ ID NO: 84466 - protein, 9 aa, synthetic construct
  source 1..9: note = Seed: VVVGAGDVG (KRAS G13D)
FVVAAVDVH

SEQ ID NO: 84467 - protein, 9 aa, synthetic construct
  source 1..9: note = Seed: VVVGAGDVG (KRAS G13D)
FVVAAVDVI

SEQ ID NO: 84468 - protein, 9 aa, synthetic construct
  source 1..9: note = Seed: VVVGAGDVG (KRAS G13D)
FVVAAVDVK

SEQ ID NO: 84469 - protein, 9 aa, synthetic construct
  source 1..9: note = Seed: VVVGAGDVG (KRAS G13D)
FVVAAVDVL

SEQ ID NO: 84470 - protein, 9 aa, synthetic construct
  source 1..9: note = Seed: VVVGAGDVG (KRAS G13D)
FVVAAVDVM

SEQ ID NO: 84471 - protein, 9 aa, synthetic construct
  source 1..9: note = Seed: VVVGAGDVG (KRAS G13D)
FVVAAVDVN

SEQ ID NO: 84472 - protein, 9 aa, synthetic construct
  source 1..9: note = Seed: VVVGAGDVG (KRAS G13D)
FVVAAVDVP

SEQ ID NO: 84473 - protein, 9 aa, synthetic construct
  source 1..9: note = Seed: VVVGAGDVG (KRAS G13D)
FVVAAVDVQ

SEQ ID NO: 84474 - protein, 9 aa, synthetic construct
  source 1..9: note = Seed: VVVGAGDVG (KRAS G13D)
FVVAAVDVR

SEQ ID NO: 84475 - protein, 9 aa, synthetic construct
  source 1..9: note = Seed: VVVGAGDVG (KRAS G13D)
FVVAAVDVS

SEQ ID NO: 84476 - protein, 9 aa, synthetic construct
  source 1..9: note = Seed: VVVGAGDVG (KRAS G13D)
FVVAAVDVT

SEQ ID NO: 84477 - protein, 9 aa, synthetic construct
  source 1..9: note = Seed: VVVGAGDVG (KRAS G13D)
FVVAAVDVV

SEQ ID NO: 84478 - protein, 9 aa, synthetic construct
  source 1..9: note = Seed: VVVGAGDVG (KRAS G13D)
FVVAAVDVW

SEQ ID NO: 84479 - protein, 9 aa, synthetic construct
  source 1..9: note = Seed: VVVGAGDVG (KRAS G13D)
FVVAAVDVY

SEQ ID NO: 84480 - protein, 9 aa, synthetic construct
  source 1..9: note = Seed: VVVGAGDVG (KRAS G13D)
FVVAAWDVA

SEQ ID NO: 84481 - protein, 9 aa, synthetic construct
  source 1..9: note = Seed: VVVGAGDVG (KRAS G13D)
FVVAAWDVN

SEQ ID NO: 84482 - protein, 9 aa, synthetic construct
  source 1..9: note = Seed: VVVGAGDVG (KRAS G13D)
FVVAAWDVS

SEQ ID NO: 84483 - protein, 9 aa, synthetic construct
  source 1..9: note = Seed: VVVGAGDVG (KRAS G13D)
FVVAAYDVA

SEQ ID NO: 84484 - protein, 9 aa, synthetic construct
  source 1..9: note = Seed: VVVGAGDVG (KRAS G13D)
FVVAAYDVG

SEQ ID NO: 84485 - protein, 9 aa, synthetic construct
  source 1..9: note = Seed: VVVGAGDVG (KRAS G13D)
FVVAAYDVH

SEQ ID NO: 84486 - protein, 9 aa, synthetic construct
  source 1..9: note = Seed: VVVGAGDVG (KRAS G13D)
FVVAAYDVM

SEQ ID NO: 84487 - protein, 9 aa, synthetic construct
  source 1..9: note = Seed: VVVGAGDVG (KRAS G13D)
FVVAAYDVN

SEQ ID NO: 84488 - protein, 9 aa, synthetic construct
  source 1..9: note = Seed: VVVGAGDVG (KRAS G13D)
FVVAAYDVQ

SEQ ID NO: 84489 - protein, 9 aa, synthetic construct
  source 1..9: note = Seed: VVVGAGDVG (KRAS G13D)
FVVAAYDVS

SEQ ID NO: 84490 - protein, 9 aa, synthetic construct
  source 1..9: note = Seed: VVVGAGDVG (KRAS G13D)
FVVAAYDVT

SEQ ID NO: 84491 - protein, 9 aa, synthetic construct
  source 1..9: note = Seed: VVVGAGDVG (KRAS G13D)
FVVAAYDVV

SEQ ID NO: 84492 - protein, 9 aa, synthetic construct
  source 1..9: note = Seed: VVVGAGDVG (KRAS G13D)
FVVCAADVA

SEQ ID NO: 84493 - protein, 9 aa, synthetic construct
  source 1..9: note = Seed: VVVGAGDVG (KRAS G13D)
FVVCAADVD

SEQ ID NO: 84494 - protein, 9 aa, synthetic construct
  source 1..9: note = Seed: VVVGAGDVG (KRAS G13D)
FVVCAADVE

SEQ ID NO: 84495 - protein, 9 aa, synthetic construct
  source 1..9: note = Seed: VVVGAGDVG (KRAS G13D)
FVVCAADVF

SEQ ID NO: 84496 - protein, 9 aa, synthetic construct
  source 1..9: note = Seed: VVVGAGDVG (KRAS G13D)
FVVCAADVG

SEQ ID NO: 84497 - protein, 9 aa, synthetic construct
  source 1..9: note = Seed: VVVGAGDVG (KRAS G13D)
FVVCAADVH

SEQ ID NO: 84498 - protein, 9 aa, synthetic construct
  source 1..9: note = Seed: VVVGAGDVG (KRAS G13D)
FVVCAADVI

SEQ ID NO: 84499 - protein, 9 aa, synthetic construct
  source 1..9: note = Seed: VVVGAGDVG (KRAS G13D)
FVVCAADVK

SEQ ID NO: 84500 - protein, 9 aa, synthetic construct
  source 1..9: note = Seed: VVVGAGDVG (KRAS G13D)
FVVCAADVL

SEQ ID NO: 84501 - protein, 9 aa, synthetic construct
  source 1..9: note = Seed: VVVGAGDVG (KRAS G13D)
FVVCAADVM

SEQ ID NO: 84502 - protein, 9 aa, synthetic construct
  source 1..9: note = Seed: VVVGAGDVG (KRAS G13D)
FVVCAADVN

SEQ ID NO: 84503 - protein, 9 aa, synthetic construct
  source 1..9: note = Seed: VVVGAGDVG (KRAS G13D)
FVVCAADVP

SEQ ID NO: 84504 - protein, 9 aa, synthetic construct
  source 1..9: note = Seed: VVVGAGDVG (KRAS G13D)
FVVCAADVQ

SEQ ID NO: 84505 - protein, 9 aa, synthetic construct
  source 1..9: note = Seed: VVVGAGDVG (KRAS G13D)
FVVCAADVR

SEQ ID NO: 84506 - protein, 9 aa, synthetic construct
  source 1..9: note = Seed: VVVGAGDVG (KRAS G13D)
FVVCAADVS

SEQ ID NO: 84507 - protein, 9 aa, synthetic construct
  source 1..9: note = Seed: VVVGAGDVG (KRAS G13D)
FVVCAADVT

SEQ ID NO: 84508 - protein, 9 aa, synthetic construct
  source 1..9: note = Seed: VVVGAGDVG (KRAS G13D)
FVVCAADVV

SEQ ID NO: 84509 - protein, 9 aa, synthetic construct
  source 1..9: note = Seed: VVVGAGDVG (KRAS G13D)
FVVCAADVY

SEQ ID NO: 84510 - protein, 9 aa, synthetic construct
  source 1..9: note = Seed: VVVGAGDVG (KRAS G13D)
FVVCAGDVA

SEQ ID NO: 84511 - protein, 9 aa, synthetic construct
  source 1..9: note = Seed: VVVGAGDVG (KRAS G13D)
FVVCAGDVN

SEQ ID NO: 84512 - protein, 9 aa, synthetic construct
  source 1..9: note = Seed: VVVGAGDVG (KRAS G13D)
FVVCAGDVS

SEQ ID NO: 84513 - protein, 9 aa, synthetic construct
  source 1..9: note = Seed: VVVGAGDVG (KRAS G13D)
FVVCAHDVA

SEQ ID NO: 84514 - protein, 9 aa, synthetic construct
  source 1..9: note = Seed: VVVGAGDVG (KRAS G13D)
FVVCAIDVA

SEQ ID NO: 84515 - protein, 9 aa, synthetic construct
  source 1..9: note = Seed: VVVGAGDVG (KRAS G13D)
FVVCAIDVH

SEQ ID NO: 84516 - protein, 9 aa, synthetic construct
  source 1..9: note = Seed: VVVGAGDVG (KRAS G13D)
FVVCAIDVM

SEQ ID NO: 84517 - protein, 9 aa, synthetic construct
  source 1..9: note = Seed: VVVGAGDVG (KRAS G13D)
FVVCAIDVN

SEQ ID NO: 84518 - protein, 9 aa, synthetic construct
  source 1..9: note = Seed: VVVGAGDVG (KRAS G13D)
FVVCAIDVQ

SEQ ID NO: 84519 - protein, 9 aa, synthetic construct
  source 1..9: note = Seed: VVVGAGDVG (KRAS G13D)
FVVCAIDVS

SEQ ID NO: 84520 - protein, 9 aa, synthetic construct
  source 1..9: note = Seed: VVVGAGDVG (KRAS G13D)
FVVCAIDVT

SEQ ID NO: 84521 - protein, 9 aa, synthetic construct
  source 1..9: note = Seed: VVVGAGDVG (KRAS G13D)
FVVCAIDVV

SEQ ID NO: 84522 - protein, 9 aa, synthetic construct
  source 1..9: note = Seed: VVVGAGDVG (KRAS G13D)
FVVCALDVA

SEQ ID NO: 84523 - protein, 9 aa, synthetic construct
  source 1..9: note = Seed: VVVGAGDVG (KRAS G13D)
FVVCALDVH

SEQ ID NO: 84524 - protein, 9 aa, synthetic construct
  source 1..9: note = Seed: VVVGAGDVG (KRAS G13D)
FVVCALDVN

SEQ ID NO: 84525 - protein, 9 aa, synthetic construct
  source 1..9: note = Seed: VVVGAGDVG (KRAS G13D)
FVVCALDVQ

SEQ ID NO: 84526 - protein, 9 aa, synthetic construct
  source 1..9: note = Seed: VVVGAGDVG (KRAS G13D)
FVVCALDVS

SEQ ID NO: 84527 - protein, 9 aa, synthetic construct
  source 1..9: note = Seed: VVVGAGDVG (KRAS G13D)
FVVCAMDVA

SEQ ID NO: 84528 - protein, 9 aa, synthetic construct
  source 1..9: note = Seed: VVVGAGDVG (KRAS G13D)
FVVCAMDVH

SEQ ID NO: 84529 - protein, 9 aa, synthetic construct
  source 1..9: note = Seed: VVVGAGDVG (KRAS G13D)
FVVCAMDVM

SEQ ID NO: 84530 - protein, 9 aa, synthetic construct
  source 1..9: note = Seed: VVVGAGDVG (KRAS G13D)
FVVCAMDVN

SEQ ID NO: 84531 - protein, 9 aa, synthetic construct
  source 1..9: note = Seed: VVVGAGDVG (KRAS G13D)
FVVCAMDVQ

SEQ ID NO: 84532 - protein, 9 aa, synthetic construct
  source 1..9: note = Seed: VVVGAGDVG (KRAS G13D)
FVVCAMDVS

SEQ ID NO: 84533 - protein, 9 aa, synthetic construct
  source 1..9: note = Seed: VVVGAGDVG (KRAS G13D)
FVVCAMDVV

SEQ ID NO: 84534 - protein, 9 aa, synthetic construct
  source 1..9: note = Seed: VVVGAGDVG (KRAS G13D)
FVVCANDVA

SEQ ID NO: 84535 - protein, 9 aa, synthetic construct
  source 1..9: note = Seed: VVVGAGDVG (KRAS G13D)
FVVCANDVG

SEQ ID NO: 84536 - protein, 9 aa, synthetic construct
  source 1..9: note = Seed: VVVGAGDVG (KRAS G13D)
FVVCANDVH

SEQ ID NO: 84537 - protein, 9 aa, synthetic construct
  source 1..9: note = Seed: VVVGAGDVG (KRAS G13D)
FVVCANDVI

SEQ ID NO: 84538 - protein, 9 aa, synthetic construct
  source 1..9: note = Seed: VVVGAGDVG (KRAS G13D)
FVVCANDVK

SEQ ID NO: 84539 - protein, 9 aa, synthetic construct
  source 1..9: note = Seed: VVVGAGDVG (KRAS G13D)
FVVCANDVL

SEQ ID NO: 84540 - protein, 9 aa, synthetic construct
  source 1..9: note = Seed: VVVGAGDVG (KRAS G13D)
FVVCANDVM

SEQ ID NO: 84541 - protein, 9 aa, synthetic construct
  source 1..9: note = Seed: VVVGAGDVG (KRAS G13D)
FVVCANDVN

SEQ ID NO: 84542 - protein, 9 aa, synthetic construct
  source 1..9: note = Seed: VVVGAGDVG (KRAS G13D)
FVVCANDVP

SEQ ID NO: 84543 - protein, 9 aa, synthetic construct
  source 1..9: note = Seed: VVVGAGDVG (KRAS G13D)
FVVCANDVQ

SEQ ID NO: 84544 - protein, 9 aa, synthetic construct
  source 1..9: note = Seed: VVVGAGDVG (KRAS G13D)
FVVCANDVR

SEQ ID NO: 84545 - protein, 9 aa, synthetic construct
  source 1..9: note = Seed: VVVGAGDVG (KRAS G13D)
FVVCANDVS

SEQ ID NO: 84546 - protein, 9 aa, synthetic construct
  source 1..9: note = Seed: VVVGAGDVG (KRAS G13D)
FVVCANDVT

SEQ ID NO: 84547 - protein, 9 aa, synthetic construct
  source 1..9: note = Seed: VVVGAGDVG (KRAS G13D)
FVVCANDVV

SEQ ID NO: 84548 - protein, 9 aa, synthetic construct
  source 1..9: note = Seed: VVVGAGDVG (KRAS G13D)
FVVCANDVY

SEQ ID NO: 84549 - protein, 9 aa, synthetic construct
  source 1..9: note = Seed: VVVGAGDVG (KRAS G13D)
FVVCAPDVA

SEQ ID NO: 84550 - protein, 9 aa, synthetic construct
  source 1..9: note = Seed: VVVGAGDVG (KRAS G13D)
FVVCAPDVF

SEQ ID NO: 84551 - protein, 9 aa, synthetic construct
  source 1..9: note = Seed: VVVGAGDVG (KRAS G13D)
FVVCAPDVG

SEQ ID NO: 84552 - protein, 9 aa, synthetic construct
  source 1..9: note = Seed: VVVGAGDVG (KRAS G13D)
FVVCAPDVH

SEQ ID NO: 84553 - protein, 9 aa, synthetic construct
  source 1..9: note = Seed: VVVGAGDVG (KRAS G13D)
FVVCAPDVI

SEQ ID NO: 84554 - protein, 9 aa, synthetic construct
  source 1..9: note = Seed: VVVGAGDVG (KRAS G13D)
FVVCAPDVL

SEQ ID NO: 84555 - protein, 9 aa, synthetic construct
  source 1..9: note = Seed: VVVGAGDVG (KRAS G13D)
FVVCAPDVM

SEQ ID NO: 84556 - protein, 9 aa, synthetic construct
  source 1..9: note = Seed: VVVGAGDVG (KRAS G13D)
FVVCAPDVN

SEQ ID NO: 84557 - protein, 9 aa, synthetic construct
  source 1..9: note = Seed: VVVGAGDVG (KRAS G13D)
FVVCAPDVQ

SEQ ID NO: 84558 - protein, 9 aa, synthetic construct
  source 1..9: note = Seed: VVVGAGDVG (KRAS G13D)
FVVCAPDVS

SEQ ID NO: 84559 - protein, 9 aa, synthetic construct
  source 1..9: note = Seed: VVVGAGDVG (KRAS G13D)
FVVCAPDVT

SEQ ID NO: 84560 - protein, 9 aa, synthetic construct
  source 1..9: note = Seed: VVVGAGDVG (KRAS G13D)
FVVCAPDVV

SEQ ID NO: 84561 - protein, 9 aa, synthetic construct
  source 1..9: note = Seed: VVVGAGDVG (KRAS G13D)
FVVCAPDVY

SEQ ID NO: 84562 - protein, 9 aa, synthetic construct
  source 1..9: note = Seed: VVVGAGDVG (KRAS G13D)
FVVCAQDVA

SEQ ID NO: 84563 - protein, 9 aa, synthetic construct
  source 1..9: note = Seed: VVVGAGDVG (KRAS G13D)
FVVCASDVA

SEQ ID NO: 84564 - protein, 9 aa, synthetic construct
  source 1..9: note = Seed: VVVGAGDVG (KRAS G13D)
FVVCASDVG

SEQ ID NO: 84565 - protein, 9 aa, synthetic construct
  source 1..9: note = Seed: VVVGAGDVG (KRAS G13D)
FVVCASDVH

SEQ ID NO: 84566 - protein, 9 aa, synthetic construct
  source 1..9: note = Seed: VVVGAGDVG (KRAS G13D)
FVVCASDVI

SEQ ID NO: 84567 - protein, 9 aa, synthetic construct
  source 1..9: note = Seed: VVVGAGDVG (KRAS G13D)
FVVCASDVL

SEQ ID NO: 84568 - protein, 9 aa, synthetic construct
  source 1..9: note = Seed: VVVGAGDVG (KRAS G13D)
FVVCASDVM

SEQ ID NO: 84569 - protein, 9 aa, synthetic construct
  source 1..9: note = Seed: VVVGAGDVG (KRAS G13D)
FVVCASDVN

SEQ ID NO: 84570 - protein, 9 aa, synthetic construct
  source 1..9: note = Seed: VVVGAGDVG (KRAS G13D)
FVVCASDVQ

SEQ ID NO: 84571 - protein, 9 aa, synthetic construct
  source 1..9: note = Seed: VVVGAGDVG (KRAS G13D)
FVVCASDVS

SEQ ID NO: 84572 - protein, 9 aa, synthetic construct
  source 1..9: note = Seed: VVVGAGDVG (KRAS G13D)
FVVCASDVT

SEQ ID NO: 84573 - protein, 9 aa, synthetic construct
  source 1..9: note = Seed: VVVGAGDVG (KRAS G13D)
FVVCASDVV

SEQ ID NO: 84574 - protein, 9 aa, synthetic construct
  source 1..9: note = Seed: VVVGAGDVG (KRAS G13D)
FVVCASDVY

SEQ ID NO: 84575 - protein, 9 aa, synthetic construct
  source 1..9: note = Seed: VVVGAGDVG (KRAS G13D)
FVVCATDVA

SEQ ID NO: 84576 - protein, 9 aa, synthetic construct
  source 1..9: note = Seed: VVVGAGDVG (KRAS G13D)
FVVCATDVG

SEQ ID NO: 84577 - protein, 9 aa, synthetic construct
  source 1..9: note = Seed: VVVGAGDVG (KRAS G13D)
FVVCATDVH

SEQ ID NO: 84578 - protein, 9 aa, synthetic construct
  source 1..9: note = Seed: VVVGAGDVG (KRAS G13D)
FVVCATDVI

SEQ ID NO: 84579 - protein, 9 aa, synthetic construct
  source 1..9: note = Seed: VVVGAGDVG (KRAS G13D)
FVVCATDVL

SEQ ID NO: 84580 - protein, 9 aa, synthetic construct
  source 1..9: note = Seed: VVVGAGDVG (KRAS G13D)
FVVCATDVM

SEQ ID NO: 84581 - protein, 9 aa, synthetic construct
  source 1..9: note = Seed: VVVGAGDVG (KRAS G13D)
FVVCATDVN

SEQ ID NO: 84582 - protein, 9 aa, synthetic construct
  source 1..9: note = Seed: VVVGAGDVG (KRAS G13D)
FVVCATDVQ

SEQ ID NO: 84583 - protein, 9 aa, synthetic construct
  source 1..9: note = Seed: VVVGAGDVG (KRAS G13D)
FVVCATDVS

SEQ ID NO: 84584 - protein, 9 aa, synthetic construct
  source 1..9: note = Seed: VVVGAGDVG (KRAS G13D)
FVVCATDVT

SEQ ID NO: 84585 - protein, 9 aa, synthetic construct
  source 1..9: note = Seed: VVVGAGDVG (KRAS G13D)
FVVCATDVV

SEQ ID NO: 84586 - protein, 9 aa, synthetic construct
  source 1..9: note = Seed: VVVGAGDVG (KRAS G13D)
FVVCATDVY

SEQ ID NO: 84587 - protein, 9 aa, synthetic construct
  source 1..9: note = Seed: VVVGAGDVG (KRAS G13D)
FVVCAVDVA

SEQ ID NO: 84588 - protein, 9 aa, synthetic construct
  source 1..9: note = Seed: VVVGAGDVG (KRAS G13D)
FVVCAVDVH

SEQ ID NO: 84589 - protein, 9 aa, synthetic construct
  source 1..9: note = Seed: VVVGAGDVG (KRAS G13D)
FVVCAVDVM

SEQ ID NO: 84590 - protein, 9 aa, synthetic construct
  source 1..9: note = Seed: VVVGAGDVG (KRAS G13D)
FVVCAVDVN

SEQ ID NO: 84591 - protein, 9 aa, synthetic construct
  source 1..9: note = Seed: VVVGAGDVG (KRAS G13D)
FVVCAVDVQ

SEQ ID NO: 84592 - protein, 9 aa, synthetic construct
  source 1..9: note = Seed: VVVGAGDVG (KRAS G13D)
FVVCAVDVS

SEQ ID NO: 84593 - protein, 9 aa, synthetic construct
  source 1..9: note = Seed: VVVGAGDVG (KRAS G13D)
FVVCAVDVT

SEQ ID NO: 84594 - protein, 9 aa, synthetic construct
  source 1..9: note = Seed: VVVGAGDVG (KRAS G13D)
FVVCAVDVV

SEQ ID NO: 84595 - protein, 9 aa, synthetic construct
  source 1..9: note = Seed: VVVGAGDVG (KRAS G13D)
FVVDAADVA

SEQ ID NO: 84596 - protein, 9 aa, synthetic construct
  source 1..9: note = Seed: VVVGAGDVG (KRAS G13D)
FVVDAADVF

SEQ ID NO: 84597 - protein, 9 aa, synthetic construct
  source 1..9: note = Seed: VVVGAGDVG (KRAS G13D)
FVVDAADVG

SEQ ID NO: 84598 - protein, 9 aa, synthetic construct
  source 1..9: note = Seed: VVVGAGDVG (KRAS G13D)
FVVDAADVH

SEQ ID NO: 84599 - protein, 9 aa, synthetic construct
  source 1..9: note = Seed: VVVGAGDVG (KRAS G13D)
FVVDAADVI

SEQ ID NO: 84600 - protein, 9 aa, synthetic construct
  source 1..9: note = Seed: VVVGAGDVG (KRAS G13D)
FVVDAADVK

SEQ ID NO: 84601 - protein, 9 aa, synthetic construct
  source 1..9: note = Seed: VVVGAGDVG (KRAS G13D)
FVVDAADVL

SEQ ID NO: 84602 - protein, 9 aa, synthetic construct
  source 1..9: note = Seed: VVVGAGDVG (KRAS G13D)
FVVDAADVM

SEQ ID NO: 84603 - protein, 9 aa, synthetic construct
  source 1..9: note = Seed: VVVGAGDVG (KRAS G13D)
FVVDAADVN

SEQ ID NO: 84604 - protein, 9 aa, synthetic construct
  source 1..9: note = Seed: VVVGAGDVG (KRAS G13D)
FVVDAADVP

SEQ ID NO: 84605 - protein, 9 aa, synthetic construct
  source 1..9: note = Seed: VVVGAGDVG (KRAS G13D)
FVVDAADVQ

SEQ ID NO: 84606 - protein, 9 aa, synthetic construct
  source 1..9: note = Seed: VVVGAGDVG (KRAS G13D)
FVVDAADVR

SEQ ID NO: 84607 - protein, 9 aa, synthetic construct
  source 1..9: note = Seed: VVVGAGDVG (KRAS G13D)
FVVDAADVS

SEQ ID NO: 84608 - protein, 9 aa, synthetic construct
  source 1..9: note = Seed: VVVGAGDVG (KRAS G13D)
FVVDAADVT

SEQ ID NO: 84609 - protein, 9 aa, synthetic construct
  source 1..9: note = Seed: VVVGAGDVG (KRAS G13D)
FVVDAADVV

SEQ ID NO: 84610 - protein, 9 aa, synthetic construct
  source 1..9: note = Seed: VVVGAGDVG (KRAS G13D)
FVVDAADVW

SEQ ID NO: 84611 - protein, 9 aa, synthetic construct
  source 1..9: note = Seed: VVVGAGDVG (KRAS G13D)
FVVDAADVY

SEQ ID NO: 84612 - protein, 9 aa, synthetic construct
  source 1..9: note = Seed: VVVGAGDVG (KRAS G13D)
FVVDADDVA

SEQ ID NO: 84613 - protein, 9 aa, synthetic construct
  source 1..9: note = Seed: VVVGAGDVG (KRAS G13D)
FVVDADDVS

SEQ ID NO: 84614 - protein, 9 aa, synthetic construct
  source 1..9: note = Seed: VVVGAGDVG (KRAS G13D)
FVVDAGDVA

SEQ ID NO: 84615 - protein, 9 aa, synthetic construct
  source 1..9: note = Seed: VVVGAGDVG (KRAS G13D)
FVVDAGDVS

SEQ ID NO: 84616 - protein, 9 aa, synthetic construct
  source 1..9: note = Seed: VVVGAGDVG (KRAS G13D)
FVVDAIDVA

SEQ ID NO: 84617 - protein, 9 aa, synthetic construct
  source 1..9: note = Seed: VVVGAGDVG (KRAS G13D)
FVVDAIDVM

SEQ ID NO: 84618 - protein, 9 aa, synthetic construct
  source 1..9: note = Seed: VVVGAGDVG (KRAS G13D)
FVVDAIDVN

SEQ ID NO: 84619 - protein, 9 aa, synthetic construct
  source 1..9: note = Seed: VVVGAGDVG (KRAS G13D)
FVVDAIDVS

SEQ ID NO: 84620 - protein, 9 aa, synthetic construct
  source 1..9: note = Seed: VVVGAGDVG (KRAS G13D)
FVVDALDVA

SEQ ID NO: 84621 - protein, 9 aa, synthetic construct
  source 1..9: note = Seed: VVVGAGDVG (KRAS G13D)
FVVDALDVI

SEQ ID NO: 84622 - protein, 9 aa, synthetic construct
  source 1..9: note = Seed: VVVGAGDVG (KRAS G13D)
FVVDALDVL

SEQ ID NO: 84623 - protein, 9 aa, synthetic construct
  source 1..9: note = Seed: VVVGAGDVG (KRAS G13D)
FVVDALDVM

SEQ ID NO: 84624 - protein, 9 aa, synthetic construct
  source 1..9: note = Seed: VVVGAGDVG (KRAS G13D)
FVVDALDVS

SEQ ID NO: 84625 - protein, 9 aa, synthetic construct
  source 1..9: note = Seed: VVVGAGDVG (KRAS G13D)
FVVDALDVV

SEQ ID NO: 84626 - protein, 9 aa, synthetic construct
  source 1..9: note = Seed: VVVGAGDVG (KRAS G13D)
FVVDALDVY

SEQ ID NO: 84627 - protein, 9 aa, synthetic construct
  source 1..9: note = Seed: VVVGAGDVG (KRAS G13D)
FVVDAMDVA

SEQ ID NO: 84628 - protein, 9 aa, synthetic construct
  source 1..9: note = Seed: VVVGAGDVG (KRAS G13D)
FVVDANDVA

SEQ ID NO: 84629 - protein, 9 aa, synthetic construct
  source 1..9: note = Seed: VVVGAGDVG (KRAS G13D)
FVVDANDVF

SEQ ID NO: 84630 - protein, 9 aa, synthetic construct
  source 1..9: note = Seed: VVVGAGDVG (KRAS G13D)
FVVDANDVG

SEQ ID NO: 84631 - protein, 9 aa, synthetic construct
  source 1..9: note = Seed: VVVGAGDVG (KRAS G13D)
FVVDANDVH

SEQ ID NO: 84632 - protein, 9 aa, synthetic construct
  source 1..9: note = Seed: VVVGAGDVG (KRAS G13D)
FVVDANDVI

SEQ ID NO: 84633 - protein, 9 aa, synthetic construct
  source 1..9: note = Seed: VVVGAGDVG (KRAS G13D)
FVVDANDVL

SEQ ID NO: 84634 - protein, 9 aa, synthetic construct
  source 1..9: note = Seed: VVVGAGDVG (KRAS G13D)
FVVDANDVM

SEQ ID NO: 84635 - protein, 9 aa, synthetic construct
  source 1..9: note = Seed: VVVGAGDVG (KRAS G13D)
FVVDANDVN

SEQ ID NO: 84636 - protein, 9 aa, synthetic construct
  source 1..9: note = Seed: VVVGAGDVG (KRAS G13D)
FVVDANDVP

SEQ ID NO: 84637 - protein, 9 aa, synthetic construct
  source 1..9: note = Seed: VVVGAGDVG (KRAS G13D)
FVVDANDVQ

SEQ ID NO: 84638 - protein, 9 aa, synthetic construct
  source 1..9: note = Seed: VVVGAGDVG (KRAS G13D)
FVVDANDVS

SEQ ID NO: 84639 - protein, 9 aa, synthetic construct
  source 1..9: note = Seed: VVVGAGDVG (KRAS G13D)
FVVDANDVT

SEQ ID NO: 84640 - protein, 9 aa, synthetic construct
  source 1..9: note = Seed: VVVGAGDVG (KRAS G13D)
FVVDANDVV

SEQ ID NO: 84641 - protein, 9 aa, synthetic construct
  source 1..9: note = Seed: VVVGAGDVG (KRAS G13D)
FVVDANDVY

SEQ ID NO: 84642 - protein, 9 aa, synthetic construct
  source 1..9: note = Seed: VVVGAGDVG (KRAS G13D)
FVVDAPDVA

SEQ ID NO: 84643 - protein, 9 aa, synthetic construct
  source 1..9: note = Seed: VVVGAGDVG (KRAS G13D)
FVVDAPDVS

SEQ ID NO: 84644 - protein, 9 aa, synthetic construct
  source 1..9: note = Seed: VVVGAGDVG (KRAS G13D)
FVVDASDVA

SEQ ID NO: 84645 - protein, 9 aa, synthetic construct
  source 1..9: note = Seed: VVVGAGDVG (KRAS G13D)
FVVDASDVG

SEQ ID NO: 84646 - protein, 9 aa, synthetic construct
  source 1..9: note = Seed: VVVGAGDVG (KRAS G13D)
FVVDASDVH

SEQ ID NO: 84647 - protein, 9 aa, synthetic construct
  source 1..9: note = Seed: VVVGAGDVG (KRAS G13D)
FVVDASDVI

SEQ ID NO: 84648 - protein, 9 aa, synthetic construct
  source 1..9: note = Seed: VVVGAGDVG (KRAS G13D)
FVVDASDVM

SEQ ID NO: 84649 - protein, 9 aa, synthetic construct
  source 1..9: note = Seed: VVVGAGDVG (KRAS G13D)
FVVDASDVN

SEQ ID NO: 84650 - protein, 9 aa, synthetic construct
  source 1..9: note = Seed: VVVGAGDVG (KRAS G13D)
FVVDASDVQ

SEQ ID NO: 84651 - protein, 9 aa, synthetic construct
  source 1..9: note = Seed: VVVGAGDVG (KRAS G13D)
FVVDASDVS

SEQ ID NO: 84652 - protein, 9 aa, synthetic construct
  source 1..9: note = Seed: VVVGAGDVG (KRAS G13D)
FVVDASDVT

SEQ ID NO: 84653 - protein, 9 aa, synthetic construct
  source 1..9: note = Seed: VVVGAGDVG (KRAS G13D)
FVVDASDVV

SEQ ID NO: 84654 - protein, 9 aa, synthetic construct
  source 1..9: note = Seed: VVVGAGDVG (KRAS G13D)
FVVDATDVA

SEQ ID NO: 84655 - protein, 9 aa, synthetic construct
  source 1..9: note = Seed: VVVGAGDVG (KRAS G13D)
FVVDATDVG

SEQ ID NO: 84656 - protein, 9 aa, synthetic construct
  source 1..9: note = Seed: VVVGAGDVG (KRAS G13D)
FVVDATDVH

SEQ ID NO: 84657 - protein, 9 aa, synthetic construct
  source 1..9: note = Seed: VVVGAGDVG (KRAS G13D)
FVVDATDVI

SEQ ID NO: 84658 - protein, 9 aa, synthetic construct
  source 1..9: note = Seed: VVVGAGDVG (KRAS G13D)
FVVDATDVL

SEQ ID NO: 84659 - protein, 9 aa, synthetic construct
  source 1..9: note = Seed: VVVGAGDVG (KRAS G13D)
FVVDATDVM

SEQ ID NO: 84660 - protein, 9 aa, synthetic construct
  source 1..9: note = Seed: VVVGAGDVG (KRAS G13D)
FVVDATDVN

SEQ ID NO: 84661 - protein, 9 aa, synthetic construct
  source 1..9: note = Seed: VVVGAGDVG (KRAS G13D)
FVVDATDVP

SEQ ID NO: 84662 - protein, 9 aa, synthetic construct
  source 1..9: note = Seed: VVVGAGDVG (KRAS G13D)
FVVDATDVQ

SEQ ID NO: 84663 - protein, 9 aa, synthetic construct
  source 1..9: note = Seed: VVVGAGDVG (KRAS G13D)
FVVDATDVS

SEQ ID NO: 84664 - protein, 9 aa, synthetic construct
  source 1..9: note = Seed: VVVGAGDVG (KRAS G13D)
FVVDATDVT

SEQ ID NO: 84665 - protein, 9 aa, synthetic construct
  source 1..9: note = Seed: VVVGAGDVG (KRAS G13D)
FVVDATDVV

SEQ ID NO: 84666 - protein, 9 aa, synthetic construct
  source 1..9: note = Seed: VVVGAGDVG (KRAS G13D)
FVVDAVDVA

SEQ ID NO: 84667 - protein, 9 aa, synthetic construct
  source 1..9: note = Seed: VVVGAGDVG (KRAS G13D)
FVVDAVDVF

SEQ ID NO: 84668 - protein, 9 aa, synthetic construct
  source 1..9: note = Seed: VVVGAGDVG (KRAS G13D)
FVVDAVDVG

SEQ ID NO: 84669 - protein, 9 aa, synthetic construct
  source 1..9: note = Seed: VVVGAGDVG (KRAS G13D)
FVVDAVDVH

SEQ ID NO: 84670 - protein, 9 aa, synthetic construct
  source 1..9: note = Seed: VVVGAGDVG (KRAS G13D)
FVVDAVDVI

SEQ ID NO: 84671 - protein, 9 aa, synthetic construct
  source 1..9: note = Seed: VVVGAGDVG (KRAS G13D)
FVVDAVDVL

SEQ ID NO: 84672 - protein, 9 aa, synthetic construct
  source 1..9: note = Seed: VVVGAGDVG (KRAS G13D)
FVVDAVDVM

SEQ ID NO: 84673 - protein, 9 aa, synthetic construct
  source 1..9: note = Seed: VVVGAGDVG (KRAS G13D)
FVVDAVDVS

SEQ ID NO: 84674 - protein, 9 aa, synthetic construct
  source 1..9: note = Seed: VVVGAGDVG (KRAS G13D)
FVVDAVDVV

SEQ ID NO: 84675 - protein, 9 aa, synthetic construct
  source 1..9: note = Seed: VVVGAGDVG (KRAS G13D)
FVVDAVDVY

SEQ ID NO: 84676 - protein, 9 aa, synthetic construct
  source 1..9: note = Seed: VVVGAGDVG (KRAS G13D)
FVVEAADVA

SEQ ID NO: 84677 - protein, 9 aa, synthetic construct
  source 1..9: note = Seed: VVVGAGDVG (KRAS G13D)
FVVEAADVC

SEQ ID NO: 84678 - protein, 9 aa, synthetic construct
  source 1..9: note = Seed: VVVGAGDVG (KRAS G13D)
FVVEAADVD

SEQ ID NO: 84679 - protein, 9 aa, synthetic construct
  source 1..9: note = Seed: VVVGAGDVG (KRAS G13D)
FVVEAADVE

SEQ ID NO: 84680 - protein, 9 aa, synthetic construct
  source 1..9: note = Seed: VVVGAGDVG (KRAS G13D)
FVVEAADVF

SEQ ID NO: 84681 - protein, 9 aa, synthetic construct
  source 1..9: note = Seed: VVVGAGDVG (KRAS G13D)
FVVEAADVG

SEQ ID NO: 84682 - protein, 9 aa, synthetic construct
  source 1..9: note = Seed: VVVGAGDVG (KRAS G13D)
FVVEAADVH

SEQ ID NO: 84683 - protein, 9 aa, synthetic construct
  source 1..9: note = Seed: VVVGAGDVG (KRAS G13D)
FVVEAADVI

SEQ ID NO: 84684 - protein, 9 aa, synthetic construct
  source 1..9: note = Seed: VVVGAGDVG (KRAS G13D)
FVVEAADVK

SEQ ID NO: 84685 - protein, 9 aa, synthetic construct
  source 1..9: note = Seed: VVVGAGDVG (KRAS G13D)
FVVEAADVL

SEQ ID NO: 84686 - protein, 9 aa, synthetic construct
  source 1..9: note = Seed: VVVGAGDVG (KRAS G13D)
FVVEAADVM

SEQ ID NO: 84687 - protein, 9 aa, synthetic construct
  source 1..9: note = Seed: VVVGAGDVG (KRAS G13D)
FVVEAADVN

SEQ ID NO: 84688 - protein, 9 aa, synthetic construct
  source 1..9: note = Seed: VVVGAGDVG (KRAS G13D)
FVVEAADVP

SEQ ID NO: 84689 - protein, 9 aa, synthetic construct
  source 1..9: note = Seed: VVVGAGDVG (KRAS G13D)
FVVEAADVQ

SEQ ID NO: 84690 - protein, 9 aa, synthetic construct
  source 1..9: note = Seed: VVVGAGDVG (KRAS G13D)
FVVEAADVR

SEQ ID NO: 84691 - protein, 9 aa, synthetic construct
  source 1..9: note = Seed: VVVGAGDVG (KRAS G13D)
FVVEAADVS

SEQ ID NO: 84692 - protein, 9 aa, synthetic construct
  source 1..9: note = Seed: VVVGAGDVG (KRAS G13D)
FVVEAADVT

SEQ ID NO: 84693 - protein, 9 aa, synthetic construct
  source 1..9: note = Seed: VVVGAGDVG (KRAS G13D)
FVVEAADVV

SEQ ID NO: 84694 - protein, 9 aa, synthetic construct
  source 1..9: note = Seed: VVVGAGDVG (KRAS G13D)
FVVEAADVW

SEQ ID NO: 84695 - protein, 9 aa, synthetic construct
  source 1..9: note = Seed: VVVGAGDVG (KRAS G13D)
FVVEAADVY

SEQ ID NO: 84696 - protein, 9 aa, synthetic construct
  source 1..9: note = Seed: VVVGAGDVG (KRAS G13D)
FVVEADDVA

SEQ ID NO: 84697 - protein, 9 aa, synthetic construct
  source 1..9: note = Seed: VVVGAGDVG (KRAS G13D)
FVVEAEDVA

SEQ ID NO: 84698 - protein, 9 aa, synthetic construct
  source 1..9: note = Seed: VVVGAGDVG (KRAS G13D)
FVVEAGDVA

SEQ ID NO: 84699 - protein, 9 aa, synthetic construct
  source 1..9: note = Seed: VVVGAGDVG (KRAS G13D)
FVVEAGDVM

SEQ ID NO: 84700 - protein, 9 aa, synthetic construct
  source 1..9: note = Seed: VVVGAGDVG (KRAS G13D)
FVVEAGDVN

SEQ ID NO: 84701 - protein, 9 aa, synthetic construct
  source 1..9: note = Seed: VVVGAGDVG (KRAS G13D)
FVVEAGDVS

SEQ ID NO: 84702 - protein, 9 aa, synthetic construct
  source 1..9: note = Seed: VVVGAGDVG (KRAS G13D)
FVVEAGDVT

SEQ ID NO: 84703 - protein, 9 aa, synthetic construct
  source 1..9: note = Seed: VVVGAGDVG (KRAS G13D)
FVVEAGDVV

SEQ ID NO: 84704 - protein, 9 aa, synthetic construct
  source 1..9: note = Seed: VVVGAGDVG (KRAS G13D)
FVVEAHDVA

SEQ ID NO: 84705 - protein, 9 aa, synthetic construct
  source 1..9: note = Seed: VVVGAGDVG (KRAS G13D)
FVVEAHDVL

SEQ ID NO: 84706 - protein, 9 aa, synthetic construct
  source 1..9: note = Seed: VVVGAGDVG (KRAS G13D)
FVVEAHDVM

SEQ ID NO: 84707 - protein, 9 aa, synthetic construct
  source 1..9: note = Seed: VVVGAGDVG (KRAS G13D)
FVVEAHDVS

SEQ ID NO: 84708 - protein, 9 aa, synthetic construct
  source 1..9: note = Seed: VVVGAGDVG (KRAS G13D)
FVVEAHDVV

SEQ ID NO: 84709 - protein, 9 aa, synthetic construct
  source 1..9: note = Seed: VVVGAGDVG (KRAS G13D)
FVVEAIDVA

SEQ ID NO: 84710 - protein, 9 aa, synthetic construct
  source 1..9: note = Seed: VVVGAGDVG (KRAS G13D)
FVVEAIDVG

SEQ ID NO: 84711 - protein, 9 aa, synthetic construct
  source 1..9: note = Seed: VVVGAGDVG (KRAS G13D)
FVVEAIDVH

SEQ ID NO: 84712 - protein, 9 aa, synthetic construct
  source 1..9: note = Seed: VVVGAGDVG (KRAS G13D)
FVVEAIDVI

SEQ ID NO: 84713 - protein, 9 aa, synthetic construct
  source 1..9: note = Seed: VVVGAGDVG (KRAS G13D)
FVVEAIDVK

SEQ ID NO: 84714 - protein, 9 aa, synthetic construct
  source 1..9: note = Seed: VVVGAGDVG (KRAS G13D)
FVVEAIDVL

SEQ ID NO: 84715 - protein, 9 aa, synthetic construct
  source 1..9: note = Seed: VVVGAGDVG (KRAS G13D)
FVVEAIDVM

SEQ ID NO: 84716 - protein, 9 aa, synthetic construct
  source 1..9: note = Seed: VVVGAGDVG (KRAS G13D)
FVVEAIDVN

SEQ ID NO: 84717 - protein, 9 aa, synthetic construct
  source 1..9: note = Seed: VVVGAGDVG (KRAS G13D)
FVVEAIDVQ

SEQ ID NO: 84718 - protein, 9 aa, synthetic construct
  source 1..9: note = Seed: VVVGAGDVG (KRAS G13D)
FVVEAIDVR

SEQ ID NO: 84719 - protein, 9 aa, synthetic construct
  source 1..9: note = Seed: VVVGAGDVG (KRAS G13D)
FVVEAIDVS

SEQ ID NO: 84720 - protein, 9 aa, synthetic construct
  source 1..9: note = Seed: VVVGAGDVG (KRAS G13D)
FVVEAIDVT

SEQ ID NO: 84721 - protein, 9 aa, synthetic construct
  source 1..9: note = Seed: VVVGAGDVG (KRAS G13D)
FVVEAIDVV

SEQ ID NO: 84722 - protein, 9 aa, synthetic construct
  source 1..9: note = Seed: VVVGAGDVG (KRAS G13D)
FVVEALDVG

SEQ ID NO: 84723 - protein, 9 aa, synthetic construct
  source 1..9: note = Seed: VVVGAGDVG (KRAS G13D)
FVVEALDVS

SEQ ID NO: 84724 - protein, 9 aa, synthetic construct
  source 1..9: note = Seed: VVVGAGDVG (KRAS G13D)
FVVEAMDVS

SEQ ID NO: 84725 - protein, 9 aa, synthetic construct
  source 1..9: note = Seed: VVVGAGDVG (KRAS G13D)
FVVEANDVA

SEQ ID NO: 84726 - protein, 9 aa, synthetic construct
  source 1..9: note = Seed: VVVGAGDVG (KRAS G13D)
FVVEANDVD

SEQ ID NO: 84727 - protein, 9 aa, synthetic construct
  source 1..9: note = Seed: VVVGAGDVG (KRAS G13D)
FVVEANDVE

SEQ ID NO: 84728 - protein, 9 aa, synthetic construct
  source 1..9: note = Seed: VVVGAGDVG (KRAS G13D)
FVVEANDVF

SEQ ID NO: 84729 - protein, 9 aa, synthetic construct
  source 1..9: note = Seed: VVVGAGDVG (KRAS G13D)
FVVEANDVG

SEQ ID NO: 84730 - protein, 9 aa, synthetic construct
  source 1..9: note = Seed: VVVGAGDVG (KRAS G13D)
FVVEANDVH

SEQ ID NO: 84731 - protein, 9 aa, synthetic construct
  source 1..9: note = Seed: VVVGAGDVG (KRAS G13D)
FVVEANDVI

SEQ ID NO: 84732 - protein, 9 aa, synthetic construct
  source 1..9: note = Seed: VVVGAGDVG (KRAS G13D)
FVVEANDVL

SEQ ID NO: 84733 - protein, 9 aa, synthetic construct
  source 1..9: note = Seed: VVVGAGDVG (KRAS G13D)
FVVEANDVM

SEQ ID NO: 84734 - protein, 9 aa, synthetic construct
  source 1..9: note = Seed: VVVGAGDVG (KRAS G13D)
FVVEANDVN

SEQ ID NO: 84735 - protein, 9 aa, synthetic construct
  source 1..9: note = Seed: VVVGAGDVG (KRAS G13D)
FVVEANDVP

SEQ ID NO: 84736 - protein, 9 aa, synthetic construct
  source 1..9: note = Seed: VVVGAGDVG (KRAS G13D)
FVVEANDVQ

SEQ ID NO: 84737 - protein, 9 aa, synthetic construct
  source 1..9: note = Seed: VVVGAGDVG (KRAS G13D)
FVVEANDVS

SEQ ID NO: 84738 - protein, 9 aa, synthetic construct
  source 1..9: note = Seed: VVVGAGDVG (KRAS G13D)
FVVEANDVT

SEQ ID NO: 84739 - protein, 9 aa, synthetic construct
  source 1..9: note = Seed: VVVGAGDVG (KRAS G13D)
FVVEANDVV

SEQ ID NO: 84740 - protein, 9 aa, synthetic construct
  source 1..9: note = Seed: VVVGAGDVG (KRAS G13D)
FVVEANDVY

SEQ ID NO: 84741 - protein, 9 aa, synthetic construct
  source 1..9: note = Seed: VVVGAGDVG (KRAS G13D)
FVVEAPDVA

SEQ ID NO: 84742 - protein, 9 aa, synthetic construct
  source 1..9: note = Seed: VVVGAGDVG (KRAS G13D)
FVVEAPDVF

SEQ ID NO: 84743 - protein, 9 aa, synthetic construct
  source 1..9: note = Seed: VVVGAGDVG (KRAS G13D)
FVVEAPDVG

SEQ ID NO: 84744 - protein, 9 aa, synthetic construct
  source 1..9: note = Seed: VVVGAGDVG (KRAS G13D)
FVVEAPDVH

SEQ ID NO: 84745 - protein, 9 aa, synthetic construct
  source 1..9: note = Seed: VVVGAGDVG (KRAS G13D)
FVVEAPDVI

SEQ ID NO: 84746 - protein, 9 aa, synthetic construct
  source 1..9: note = Seed: VVVGAGDVG (KRAS G13D)
FVVEAPDVL

SEQ ID NO: 84747 - protein, 9 aa, synthetic construct
  source 1..9: note = Seed: VVVGAGDVG (KRAS G13D)
FVVEAPDVM

SEQ ID NO: 84748 - protein, 9 aa, synthetic construct
  source 1..9: note = Seed: VVVGAGDVG (KRAS G13D)
FVVEAPDVN

SEQ ID NO: 84749 - protein, 9 aa, synthetic construct
  source 1..9: note = Seed: VVVGAGDVG (KRAS G13D)
FVVEAPDVQ

SEQ ID NO: 84750 - protein, 9 aa, synthetic construct
  source 1..9: note = Seed: VVVGAGDVG (KRAS G13D)
FVVEAPDVS

SEQ ID NO: 84751 - protein, 9 aa, synthetic construct
  source 1..9: note = Seed: VVVGAGDVG (KRAS G13D)
FVVEAPDVT

SEQ ID NO: 84752 - protein, 9 aa, synthetic construct
  source 1..9: note = Seed: VVVGAGDVG (KRAS G13D)
FVVEAPDVV

SEQ ID NO: 84753 - protein, 9 aa, synthetic construct
  source 1..9: note = Seed: VVVGAGDVG (KRAS G13D)
FVVEAPDVY

SEQ ID NO: 84754 - protein, 9 aa, synthetic construct
  source 1..9: note = Seed: VVVGAGDVG (KRAS G13D)
FVVEAQDVA

SEQ ID NO: 84755 - protein, 9 aa, synthetic construct
  source 1..9: note = Seed: VVVGAGDVG (KRAS G13D)
FVVEASDVA

SEQ ID NO: 84756 - protein, 9 aa, synthetic construct
  source 1..9: note = Seed: VVVGAGDVG (KRAS G13D)
FVVEASDVF

SEQ ID NO: 84757 - protein, 9 aa, synthetic construct
  source 1..9: note = Seed: VVVGAGDVG (KRAS G13D)
FVVEASDVG

SEQ ID NO: 84758 - protein, 9 aa, synthetic construct
  source 1..9: note = Seed: VVVGAGDVG (KRAS G13D)
FVVEASDVH

SEQ ID NO: 84759 - protein, 9 aa, synthetic construct
  source 1..9: note = Seed: VVVGAGDVG (KRAS G13D)
FVVEASDVI

SEQ ID NO: 84760 - protein, 9 aa, synthetic construct
  source 1..9: note = Seed: VVVGAGDVG (KRAS G13D)
FVVEASDVK

SEQ ID NO: 84761 - protein, 9 aa, synthetic construct
  source 1..9: note = Seed: VVVGAGDVG (KRAS G13D)
FVVEASDVL

SEQ ID NO: 84762 - protein, 9 aa, synthetic construct
  source 1..9: note = Seed: VVVGAGDVG (KRAS G13D)
FVVEASDVM

SEQ ID NO: 84763 - protein, 9 aa, synthetic construct
  source 1..9: note = Seed: VVVGAGDVG (KRAS G13D)
FVVEASDVN

SEQ ID NO: 84764 - protein, 9 aa, synthetic construct
  source 1..9: note = Seed: VVVGAGDVG (KRAS G13D)
FVVEASDVP

SEQ ID NO: 84765 - protein, 9 aa, synthetic construct
  source 1..9: note = Seed: VVVGAGDVG (KRAS G13D)
FVVEASDVQ

SEQ ID NO: 84766 - protein, 9 aa, synthetic construct
  source 1..9: note = Seed: VVVGAGDVG (KRAS G13D)
FVVEASDVR

SEQ ID NO: 84767 - protein, 9 aa, synthetic construct
  source 1..9: note = Seed: VVVGAGDVG (KRAS G13D)
FVVEASDVS

SEQ ID NO: 84768 - protein, 9 aa, synthetic construct
  source 1..9: note = Seed: VVVGAGDVG (KRAS G13D)
FVVEASDVT

SEQ ID NO: 84769 - protein, 9 aa, synthetic construct
  source 1..9: note = Seed: VVVGAGDVG (KRAS G13D)
FVVEASDVV

SEQ ID NO: 84770 - protein, 9 aa, synthetic construct
  source 1..9: note = Seed: VVVGAGDVG (KRAS G13D)
FVVEASDVY

SEQ ID NO: 84771 - protein, 9 aa, synthetic construct
  source 1..9: note = Seed: VVVGAGDVG (KRAS G13D)
FVVEATDVA

SEQ ID NO: 84772 - protein, 9 aa, synthetic construct
  source 1..9: note = Seed: VVVGAGDVG (KRAS G13D)
FVVEATDVG

SEQ ID NO: 84773 - protein, 9 aa, synthetic construct
  source 1..9: note = Seed: VVVGAGDVG (KRAS G13D)
FVVEATDVH

SEQ ID NO: 84774 - protein, 9 aa, synthetic construct
  source 1..9: note = Seed: VVVGAGDVG (KRAS G13D)
FVVEATDVI

SEQ ID NO: 84775 - protein, 9 aa, synthetic construct
  source 1..9: note = Seed: VVVGAGDVG (KRAS G13D)
FVVEATDVK

SEQ ID NO: 84776 - protein, 9 aa, synthetic construct
  source 1..9: note = Seed: VVVGAGDVG (KRAS G13D)
FVVEATDVL

SEQ ID NO: 84777 - protein, 9 aa, synthetic construct
  source 1..9: note = Seed: VVVGAGDVG (KRAS G13D)
FVVEATDVM

SEQ ID NO: 84778 - protein, 9 aa, synthetic construct
  source 1..9: note = Seed: VVVGAGDVG (KRAS G13D)
FVVEATDVN

SEQ ID NO: 84779 - protein, 9 aa, synthetic construct
  source 1..9: note = Seed: VVVGAGDVG (KRAS G13D)
FVVEATDVQ

SEQ ID NO: 84780 - protein, 9 aa, synthetic construct
  source 1..9: note = Seed: VVVGAGDVG (KRAS G13D)
FVVEATDVR

SEQ ID NO: 84781 - protein, 9 aa, synthetic construct
  source 1..9: note = Seed: VVVGAGDVG (KRAS G13D)
FVVEATDVS

SEQ ID NO: 84782 - protein, 9 aa, synthetic construct
  source 1..9: note = Seed: VVVGAGDVG (KRAS G13D)
FVVEATDVT

SEQ ID NO: 84783 - protein, 9 aa, synthetic construct
  source 1..9: note = Seed: VVVGAGDVG (KRAS G13D)
FVVEATDVV

SEQ ID NO: 84784 - protein, 9 aa, synthetic construct
  source 1..9: note = Seed: VVVGAGDVG (KRAS G13D)
FVVEATDVY

SEQ ID NO: 84785 - protein, 9 aa, synthetic construct
  source 1..9: note = Seed: VVVGAGDVG (KRAS G13D)
FVVEAVDVA

SEQ ID NO: 84786 - protein, 9 aa, synthetic construct
  source 1..9: note = Seed: VVVGAGDVG (KRAS G13D)
FVVEAVDVG

SEQ ID NO: 84787 - protein, 9 aa, synthetic construct
  source 1..9: note = Seed: VVVGAGDVG (KRAS G13D)
FVVEAVDVH

SEQ ID NO: 84788 - protein, 9 aa, synthetic construct
  source 1..9: note = Seed: VVVGAGDVG (KRAS G13D)
FVVEAVDVI

SEQ ID NO: 84789 - protein, 9 aa, synthetic construct
  source 1..9: note = Seed: VVVGAGDVG (KRAS G13D)
FVVEAVDVK

SEQ ID NO: 84790 - protein, 9 aa, synthetic construct
  source 1..9: note = Seed: VVVGAGDVG (KRAS G13D)
FVVEAVDVL

SEQ ID NO: 84791 - protein, 9 aa, synthetic construct
  source 1..9: note = Seed: VVVGAGDVG (KRAS G13D)
FVVEAVDVM

SEQ ID NO: 84792 - protein, 9 aa, synthetic construct
  source 1..9: note = Seed: VVVGAGDVG (KRAS G13D)
FVVEAVDVN

SEQ ID NO: 84793 - protein, 9 aa, synthetic construct
  source 1..9: note = Seed: VVVGAGDVG (KRAS G13D)
FVVEAVDVP

SEQ ID NO: 84794 - protein, 9 aa, synthetic construct
  source 1..9: note = Seed: VVVGAGDVG (KRAS G13D)
FVVEAVDVQ

SEQ ID NO: 84795 - protein, 9 aa, synthetic construct
  source 1..9: note = Seed: VVVGAGDVG (KRAS G13D)
FVVEAVDVR

SEQ ID NO: 84796 - protein, 9 aa, synthetic construct
  source 1..9: note = Seed: VVVGAGDVG (KRAS G13D)
FVVEAVDVS

SEQ ID NO: 84797 - protein, 9 aa, synthetic construct
  source 1..9: note = Seed: VVVGAGDVG (KRAS G13D)
FVVEAVDVT

SEQ ID NO: 84798 - protein, 9 aa, synthetic construct
  source 1..9: note = Seed: VVVGAGDVG (KRAS G13D)
FVVEAVDVV

SEQ ID NO: 84799 - protein, 9 aa, synthetic construct
  source 1..9: note = Seed: VVVGAGDVG (KRAS G13D)
FVVFAADVA

SEQ ID NO: 84800 - protein, 9 aa, synthetic construct
  source 1..9: note = Seed: VVVGAGDVG (KRAS G13D)
FVVFAADVC

SEQ ID NO: 84801 - protein, 9 aa, synthetic construct
  source 1..9: note = Seed: VVVGAGDVG (KRAS G13D)
FVVFAADVD

SEQ ID NO: 84802 - protein, 9 aa, synthetic construct
  source 1..9: note = Seed: VVVGAGDVG (KRAS G13D)
FVVFAADVE

SEQ ID NO: 84803 - protein, 9 aa, synthetic construct
  source 1..9: note = Seed: VVVGAGDVG (KRAS G13D)
FVVFAADVF

SEQ ID NO: 84804 - protein, 9 aa, synthetic construct
  source 1..9: note = Seed: VVVGAGDVG (KRAS G13D)
FVVFAADVG

SEQ ID NO: 84805 - protein, 9 aa, synthetic construct
  source 1..9: note = Seed: VVVGAGDVG (KRAS G13D)
FVVFAADVH

SEQ ID NO: 84806 - protein, 9 aa, synthetic construct
  source 1..9: note = Seed: VVVGAGDVG (KRAS G13D)
FVVFAADVI

SEQ ID NO: 84807 - protein, 9 aa, synthetic construct
  source 1..9: note = Seed: VVVGAGDVG (KRAS G13D)
FVVFAADVK

SEQ ID NO: 84808 - protein, 9 aa, synthetic construct
  source 1..9: note = Seed: VVVGAGDVG (KRAS G13D)
FVVFAADVL

SEQ ID NO: 84809 - protein, 9 aa, synthetic construct
  source 1..9: note = Seed: VVVGAGDVG (KRAS G13D)
FVVFAADVM

SEQ ID NO: 84810 - protein, 9 aa, synthetic construct
  source 1..9: note = Seed: VVVGAGDVG (KRAS G13D)
FVVFAADVN

SEQ ID NO: 84811 - protein, 9 aa, synthetic construct
  source 1..9: note = Seed: VVVGAGDVG (KRAS G13D)
FVVFAADVP

SEQ ID NO: 84812 - protein, 9 aa, synthetic construct
  source 1..9: note = Seed: VVVGAGDVG (KRAS G13D)
FVVFAADVQ

SEQ ID NO: 84813 - protein, 9 aa, synthetic construct
  source 1..9: note = Seed: VVVGAGDVG (KRAS G13D)
FVVFAADVR

SEQ ID NO: 84814 - protein, 9 aa, synthetic construct
  source 1..9: note = Seed: VVVGAGDVG (KRAS G13D)
FVVFAADVS

SEQ ID NO: 84815 - protein, 9 aa, synthetic construct
  source 1..9: note = Seed: VVVGAGDVG (KRAS G13D)
FVVFAADVT

SEQ ID NO: 84816 - protein, 9 aa, synthetic construct
  source 1..9: note = Seed: VVVGAGDVG (KRAS G13D)
FVVFAADVV

SEQ ID NO: 84817 - protein, 9 aa, synthetic construct
  source 1..9: note = Seed: VVVGAGDVG (KRAS G13D)
FVVFAADVY

SEQ ID NO: 84818 - protein, 9 aa, synthetic construct
  source 1..9: note = Seed: VVVGAGDVG (KRAS G13D)
FVVFADDVA

SEQ ID NO: 84819 - protein, 9 aa, synthetic construct
  source 1..9: note = Seed: VVVGAGDVG (KRAS G13D)
FVVFADDVC

SEQ ID NO: 84820 - protein, 9 aa, synthetic construct
  source 1..9: note = Seed: VVVGAGDVG (KRAS G13D)
FVVFADDVD

SEQ ID NO: 84821 - protein, 9 aa, synthetic construct
  source 1..9: note = Seed: VVVGAGDVG (KRAS G13D)
FVVFADDVE

SEQ ID NO: 84822 - protein, 9 aa, synthetic construct
  source 1..9: note = Seed: VVVGAGDVG (KRAS G13D)
FVVFADDVF

SEQ ID NO: 84823 - protein, 9 aa, synthetic construct
  source 1..9: note = Seed: VVVGAGDVG (KRAS G13D)
FVVFADDVG

SEQ ID NO: 84824 - protein, 9 aa, synthetic construct
  source 1..9: note = Seed: VVVGAGDVG (KRAS G13D)
FVVFADDVH

SEQ ID NO: 84825 - protein, 9 aa, synthetic construct
  source 1..9: note = Seed: VVVGAGDVG (KRAS G13D)
FVVFADDVI

SEQ ID NO: 84826 - protein, 9 aa, synthetic construct
  source 1..9: note = Seed: VVVGAGDVG (KRAS G13D)
FVVFADDVL

SEQ ID NO: 84827 - protein, 9 aa, synthetic construct
  source 1..9: note = Seed: VVVGAGDVG (KRAS G13D)
FVVFADDVM

SEQ ID NO: 84828 - protein, 9 aa, synthetic construct
  source 1..9: note = Seed: VVVGAGDVG (KRAS G13D)
FVVFADDVN

SEQ ID NO: 84829 - protein, 9 aa, synthetic construct
  source 1..9: note = Seed: VVVGAGDVG (KRAS G13D)
FVVFADDVP

SEQ ID NO: 84830 - protein, 9 aa, synthetic construct
  source 1..9: note = Seed: VVVGAGDVG (KRAS G13D)
FVVFADDVQ

SEQ ID NO: 84831 - protein, 9 aa, synthetic construct
  source 1..9: note = Seed: VVVGAGDVG (KRAS G13D)
FVVFADDVS

SEQ ID NO: 84832 - protein, 9 aa, synthetic construct
  source 1..9: note = Seed: VVVGAGDVG (KRAS G13D)
FVVFADDVT

SEQ ID NO: 84833 - protein, 9 aa, synthetic construct
  source 1..9: note = Seed: VVVGAGDVG (KRAS G13D)
FVVFADDVV

SEQ ID NO: 84834 - protein, 9 aa, synthetic construct
  source 1..9: note = Seed: VVVGAGDVG (KRAS G13D)
FVVFADDVY

SEQ ID NO: 84835 - protein, 9 aa, synthetic construct
  source 1..9: note = Seed: VVVGAGDVG (KRAS G13D)
FVVFAEDVA

SEQ ID NO: 84836 - protein, 9 aa, synthetic construct
  source 1..9: note = Seed: VVVGAGDVG (KRAS G13D)
FVVFAEDVN

SEQ ID NO: 84837 - protein, 9 aa, synthetic construct
  source 1..9: note = Seed: VVVGAGDVG (KRAS G13D)
FVVFAEDVS

SEQ ID NO: 84838 - protein, 9 aa, synthetic construct
  source 1..9: note = Seed: VVVGAGDVG (KRAS G13D)
FVVFAGDVA

SEQ ID NO: 84839 - protein, 9 aa, synthetic construct
  source 1..9: note = Seed: VVVGAGDVG (KRAS G13D)
FVVFAGDVG

SEQ ID NO: 84840 - protein, 9 aa, synthetic construct
  source 1..9: note = Seed: VVVGAGDVG (KRAS G13D)
FVVFAGDVH

SEQ ID NO: 84841 - protein, 9 aa, synthetic construct
  source 1..9: note = Seed: VVVGAGDVG (KRAS G13D)
FVVFAGDVI

SEQ ID NO: 84842 - protein, 9 aa, synthetic construct
  source 1..9: note = Seed: VVVGAGDVG (KRAS G13D)
FVVFAGDVL

SEQ ID NO: 84843 - protein, 9 aa, synthetic construct
  source 1..9: note = Seed: VVVGAGDVG (KRAS G13D)
FVVFAGDVM

SEQ ID NO: 84844 - protein, 9 aa, synthetic construct
  source 1..9: note = Seed: VVVGAGDVG (KRAS G13D)
FVVFAGDVN

SEQ ID NO: 84845 - protein, 9 aa, synthetic construct
  source 1..9: note = Seed: VVVGAGDVG (KRAS G13D)
FVVFAGDVP

SEQ ID NO: 84846 - protein, 9 aa, synthetic construct
  source 1..9: note = Seed: VVVGAGDVG (KRAS G13D)
FVVFAGDVQ

SEQ ID NO: 84847 - protein, 9 aa, synthetic construct
  source 1..9: note = Seed: VVVGAGDVG (KRAS G13D)
FVVFAGDVS

SEQ ID NO: 84848 - protein, 9 aa, synthetic construct
  source 1..9: note = Seed: VVVGAGDVG (KRAS G13D)
FVVFAGDVT

SEQ ID NO: 84849 - protein, 9 aa, synthetic construct
  source 1..9: note = Seed: VVVGAGDVG (KRAS G13D)
FVVFAGDVV

SEQ ID NO: 84850 - protein, 9 aa, synthetic construct
  source 1..9: note = Seed: VVVGAGDVG (KRAS G13D)
FVVFAHDVA

SEQ ID NO: 84851 - protein, 9 aa, synthetic construct
  source 1..9: note = Seed: VVVGAGDVG (KRAS G13D)
FVVFAHDVG

SEQ ID NO: 84852 - protein, 9 aa, synthetic construct
  source 1..9: note = Seed: VVVGAGDVG (KRAS G13D)
FVVFAHDVH

SEQ ID NO: 84853 - protein, 9 aa, synthetic construct
  source 1..9: note = Seed: VVVGAGDVG (KRAS G13D)
FVVFAHDVL

SEQ ID NO: 84854 - protein, 9 aa, synthetic construct
  source 1..9: note = Seed: VVVGAGDVG (KRAS G13D)
FVVFAHDVM

SEQ ID NO: 84855 - protein, 9 aa, synthetic construct
  source 1..9: note = Seed: VVVGAGDVG (KRAS G13D)
FVVFAHDVN

SEQ ID NO: 84856 - protein, 9 aa, synthetic construct
  source 1..9: note = Seed: VVVGAGDVG (KRAS G13D)
FVVFAHDVQ

SEQ ID NO: 84857 - protein, 9 aa, synthetic construct
  source 1..9: note = Seed: VVVGAGDVG (KRAS G13D)
FVVFAHDVS

SEQ ID NO: 84858 - protein, 9 aa, synthetic construct
  source 1..9: note = Seed: VVVGAGDVG (KRAS G13D)
FVVFAHDVT

SEQ ID NO: 84859 - protein, 9 aa, synthetic construct
  source 1..9: note = Seed: VVVGAGDVG (KRAS G13D)
FVVFAHDVV

SEQ ID NO: 84860 - protein, 9 aa, synthetic construct
  source 1..9: note = Seed: VVVGAGDVG (KRAS G13D)
FVVFAIDVA

SEQ ID NO: 84861 - protein, 9 aa, synthetic construct
  source 1..9: note = Seed: VVVGAGDVG (KRAS G13D)
FVVFAIDVD

SEQ ID NO: 84862 - protein, 9 aa, synthetic construct
  source 1..9: note = Seed: VVVGAGDVG (KRAS G13D)
FVVFAIDVG

SEQ ID NO: 84863 - protein, 9 aa, synthetic construct
  source 1..9: note = Seed: VVVGAGDVG (KRAS G13D)
FVVFAIDVH

SEQ ID NO: 84864 - protein, 9 aa, synthetic construct
  source 1..9: note = Seed: VVVGAGDVG (KRAS G13D)
FVVFAIDVM

SEQ ID NO: 84865 - protein, 9 aa, synthetic construct
  source 1..9: note = Seed: VVVGAGDVG (KRAS G13D)
FVVFAIDVN

SEQ ID NO: 84866 - protein, 9 aa, synthetic construct
  source 1..9: note = Seed: VVVGAGDVG (KRAS G13D)
FVVFAIDVQ

SEQ ID NO: 84867 - protein, 9 aa, synthetic construct
  source 1..9: note = Seed: VVVGAGDVG (KRAS G13D)
FVVFAIDVS

SEQ ID NO: 84868 - protein, 9 aa, synthetic construct
  source 1..9: note = Seed: VVVGAGDVG (KRAS G13D)
FVVFAIDVT

SEQ ID NO: 84869 - protein, 9 aa, synthetic construct
  source 1..9: note = Seed: VVVGAGDVG (KRAS G13D)
FVVFAIDVY

SEQ ID NO: 84870 - protein, 9 aa, synthetic construct
  source 1..9: note = Seed: VVVGAGDVG (KRAS G13D)
FVVFAKDVA

SEQ ID NO: 84871 - protein, 9 aa, synthetic construct
  source 1..9: note = Seed: VVVGAGDVG (KRAS G13D)
FVVFALDVA

SEQ ID NO: 84872 - protein, 9 aa, synthetic construct
  source 1..9: note = Seed: VVVGAGDVG (KRAS G13D)
FVVFAMDVA

SEQ ID NO: 84873 - protein, 9 aa, synthetic construct
  source 1..9: note = Seed: VVVGAGDVG (KRAS G13D)
FVVFAMDVM

SEQ ID NO: 84874 - protein, 9 aa, synthetic construct
  source 1..9: note = Seed: VVVGAGDVG (KRAS G13D)
FVVFAMDVV

SEQ ID NO: 84875 - protein, 9 aa, synthetic construct
  source 1..9: note = Seed: VVVGAGDVG (KRAS G13D)
FVVFANDVA

SEQ ID NO: 84876 - protein, 9 aa, synthetic construct
  source 1..9: note = Seed: VVVGAGDVG (KRAS G13D)
FVVFANDVD

SEQ ID NO: 84877 - protein, 9 aa, synthetic construct
  source 1..9: note = Seed: VVVGAGDVG (KRAS G13D)
FVVFANDVE

SEQ ID NO: 84878 - protein, 9 aa, synthetic construct
  source 1..9: note = Seed: VVVGAGDVG (KRAS G13D)
FVVFANDVF

SEQ ID NO: 84879 - protein, 9 aa, synthetic construct
  source 1..9: note = Seed: VVVGAGDVG (KRAS G13D)
FVVFANDVG

SEQ ID NO: 84880 - protein, 9 aa, synthetic construct
  source 1..9: note = Seed: VVVGAGDVG (KRAS G13D)
FVVFANDVH

SEQ ID NO: 84881 - protein, 9 aa, synthetic construct
  source 1..9: note = Seed: VVVGAGDVG (KRAS G13D)
FVVFANDVI

SEQ ID NO: 84882 - protein, 9 aa, synthetic construct
  source 1..9: note = Seed: VVVGAGDVG (KRAS G13D)
FVVFANDVK

SEQ ID NO: 84883 - protein, 9 aa, synthetic construct
  source 1..9: note = Seed: VVVGAGDVG (KRAS G13D)
FVVFANDVL

SEQ ID NO: 84884 - protein, 9 aa, synthetic construct
  source 1..9: note = Seed: VVVGAGDVG (KRAS G13D)
FVVFANDVM

SEQ ID NO: 84885 - protein, 9 aa, synthetic construct
  source 1..9: note = Seed: VVVGAGDVG (KRAS G13D)
FVVFANDVN

SEQ ID NO: 84886 - protein, 9 aa, synthetic construct
  source 1..9: note = Seed: VVVGAGDVG (KRAS G13D)
FVVFANDVP

SEQ ID NO: 84887 - protein, 9 aa, synthetic construct
  source 1..9: note = Seed: VVVGAGDVG (KRAS G13D)
FVVFANDVQ

SEQ ID NO: 84888 - protein, 9 aa, synthetic construct
  source 1..9: note = Seed: VVVGAGDVG (KRAS G13D)
FVVFANDVR

SEQ ID NO: 84889 - protein, 9 aa, synthetic construct
  source 1..9: note = Seed: VVVGAGDVG (KRAS G13D)
FVVFANDVS

SEQ ID NO: 84890 - protein, 9 aa, synthetic construct
  source 1..9: note = Seed: VVVGAGDVG (KRAS G13D)
FVVFANDVT

SEQ ID NO: 84891 - protein, 9 aa, synthetic construct
  source 1..9: note = Seed: VVVGAGDVG (KRAS G13D)
FVVFANDVV

SEQ ID NO: 84892 - protein, 9 aa, synthetic construct
  source 1..9: note = Seed: VVVGAGDVG (KRAS G13D)
FVVFANDVW

SEQ ID NO: 84893 - protein, 9 aa, synthetic construct
  source 1..9: note = Seed: VVVGAGDVG (KRAS G13D)
FVVFANDVY

SEQ ID NO: 84894 - protein, 9 aa, synthetic construct
  source 1..9: note = Seed: VVVGAGDVG (KRAS G13D)
FVVFAPDVA

SEQ ID NO: 84895 - protein, 9 aa, synthetic construct
  source 1..9: note = Seed: VVVGAGDVG (KRAS G13D)
FVVFAPDVC

SEQ ID NO: 84896 - protein, 9 aa, synthetic construct
  source 1..9: note = Seed: VVVGAGDVG (KRAS G13D)
FVVFAPDVD

SEQ ID NO: 84897 - protein, 9 aa, synthetic construct
  source 1..9: note = Seed: VVVGAGDVG (KRAS G13D)
FVVFAPDVE

SEQ ID NO: 84898 - protein, 9 aa, synthetic construct
  source 1..9: note = Seed: VVVGAGDVG (KRAS G13D)
FVVFAPDVF

SEQ ID NO: 84899 - protein, 9 aa, synthetic construct
  source 1..9: note = Seed: VVVGAGDVG (KRAS G13D)
FVVFAPDVG

SEQ ID NO: 84900 - protein, 9 aa, synthetic construct
  source 1..9: note = Seed: VVVGAGDVG (KRAS G13D)
FVVFAPDVH

SEQ ID NO: 84901 - protein, 9 aa, synthetic construct
  source 1..9: note = Seed: VVVGAGDVG (KRAS G13D)
FVVFAPDVI

SEQ ID NO: 84902 - protein, 9 aa, synthetic construct
  source 1..9: note = Seed: VVVGAGDVG (KRAS G13D)
FVVFAPDVK

SEQ ID NO: 84903 - protein, 9 aa, synthetic construct
  source 1..9: note = Seed: VVVGAGDVG (KRAS G13D)
FVVFAPDVL

SEQ ID NO: 84904 - protein, 9 aa, synthetic construct
  source 1..9: note = Seed: VVVGAGDVG (KRAS G13D)
FVVFAPDVM

SEQ ID NO: 84905 - protein, 9 aa, synthetic construct
  source 1..9: note = Seed: VVVGAGDVG (KRAS G13D)
FVVFAPDVN

SEQ ID NO: 84906 - protein, 9 aa, synthetic construct
  source 1..9: note = Seed: VVVGAGDVG (KRAS G13D)
FVVFAPDVP

SEQ ID NO: 84907 - protein, 9 aa, synthetic construct
  source 1..9: note = Seed: VVVGAGDVG (KRAS G13D)
FVVFAPDVQ

SEQ ID NO: 84908 - protein, 9 aa, synthetic construct
  source 1..9: note = Seed: VVVGAGDVG (KRAS G13D)
FVVFAPDVR

SEQ ID NO: 84909 - protein, 9 aa, synthetic construct
  source 1..9: note = Seed: VVVGAGDVG (KRAS G13D)
FVVFAPDVS

SEQ ID NO: 84910 - protein, 9 aa, synthetic construct
  source 1..9: note = Seed: VVVGAGDVG (KRAS G13D)
FVVFAPDVT

SEQ ID NO: 84911 - protein, 9 aa, synthetic construct
  source 1..9: note = Seed: VVVGAGDVG (KRAS G13D)
FVVFAPDVV

SEQ ID NO: 84912 - protein, 9 aa, synthetic construct
  source 1..9: note = Seed: VVVGAGDVG (KRAS G13D)
FVVFAPDVW

SEQ ID NO: 84913 - protein, 9 aa, synthetic construct
  source 1..9: note = Seed: VVVGAGDVG (KRAS G13D)
FVVFAPDVY

SEQ ID NO: 84914 - protein, 9 aa, synthetic construct
  source 1..9: note = Seed: VVVGAGDVG (KRAS G13D)
FVVFAQDVA

SEQ ID NO: 84915 - protein, 9 aa, synthetic construct
  source 1..9: note = Seed: VVVGAGDVG (KRAS G13D)
FVVFAQDVS

SEQ ID NO: 84916 - protein, 9 aa, synthetic construct
  source 1..9: note = Seed: VVVGAGDVG (KRAS G13D)
FVVFAQDVV

SEQ ID NO: 84917 - protein, 9 aa, synthetic construct
  source 1..9: note = Seed: VVVGAGDVG (KRAS G13D)
FVVFARDVA

SEQ ID NO: 84918 - protein, 9 aa, synthetic construct
  source 1..9: note = Seed: VVVGAGDVG (KRAS G13D)
FVVFASDVA

SEQ ID NO: 84919 - protein, 9 aa, synthetic construct
  source 1..9: note = Seed: VVVGAGDVG (KRAS G13D)
FVVFASDVD

SEQ ID NO: 84920 - protein, 9 aa, synthetic construct
  source 1..9: note = Seed: VVVGAGDVG (KRAS G13D)
FVVFASDVE

SEQ ID NO: 84921 - protein, 9 aa, synthetic construct
  source 1..9: note = Seed: VVVGAGDVG (KRAS G13D)
FVVFASDVF

SEQ ID NO: 84922 - protein, 9 aa, synthetic construct
  source 1..9: note = Seed: VVVGAGDVG (KRAS G13D)
FVVFASDVG

SEQ ID NO: 84923 - protein, 9 aa, synthetic construct
  source 1..9: note = Seed: VVVGAGDVG (KRAS G13D)
FVVFASDVH

SEQ ID NO: 84924 - protein, 9 aa, synthetic construct
  source 1..9: note = Seed: VVVGAGDVG (KRAS G13D)
FVVFASDVI

SEQ ID NO: 84925 - protein, 9 aa, synthetic construct
  source 1..9: note = Seed: VVVGAGDVG (KRAS G13D)
FVVFASDVK

SEQ ID NO: 84926 - protein, 9 aa, synthetic construct
  source 1..9: note = Seed: VVVGAGDVG (KRAS G13D)
FVVFASDVL

SEQ ID NO: 84927 - protein, 9 aa, synthetic construct
  source 1..9: note = Seed: VVVGAGDVG (KRAS G13D)
FVVFASDVM

SEQ ID NO: 84928 - protein, 9 aa, synthetic construct
  source 1..9: note = Seed: VVVGAGDVG (KRAS G13D)
FVVFASDVN

SEQ ID NO: 84929 - protein, 9 aa, synthetic construct
  source 1..9: note = Seed: VVVGAGDVG (KRAS G13D)
FVVFASDVP

SEQ ID NO: 84930 - protein, 9 aa, synthetic construct
  source 1..9: note = Seed: VVVGAGDVG (KRAS G13D)
FVVFASDVQ

SEQ ID NO: 84931 - protein, 9 aa, synthetic construct
  source 1..9: note = Seed: VVVGAGDVG (KRAS G13D)
FVVFASDVR

SEQ ID NO: 84932 - protein, 9 aa, synthetic construct
  source 1..9: note = Seed: VVVGAGDVG (KRAS G13D)
FVVFASDVS

SEQ ID NO: 84933 - protein, 9 aa, synthetic construct
  source 1..9: note = Seed: VVVGAGDVG (KRAS G13D)
FVVFASDVT

SEQ ID NO: 84934 - protein, 9 aa, synthetic construct
  source 1..9: note = Seed: VVVGAGDVG (KRAS G13D)
FVVFASDVV

SEQ ID NO: 84935 - protein, 9 aa, synthetic construct
  source 1..9: note = Seed: VVVGAGDVG (KRAS G13D)
FVVFASDVY

SEQ ID NO: 84936 - protein, 9 aa, synthetic construct
  source 1..9: note = Seed: VVVGAGDVG (KRAS G13D)
FVVFATDVA

SEQ ID NO: 84937 - protein, 9 aa, synthetic construct
  source 1..9: note = Seed: VVVGAGDVG (KRAS G13D)
FVVFATDVD

SEQ ID NO: 84938 - protein, 9 aa, synthetic construct
  source 1..9: note = Seed: VVVGAGDVG (KRAS G13D)
FVVFATDVE

SEQ ID NO: 84939 - protein, 9 aa, synthetic construct
  source 1..9: note = Seed: VVVGAGDVG (KRAS G13D)
FVVFATDVG

SEQ ID NO: 84940 - protein, 9 aa, synthetic construct
  source 1..9: note = Seed: VVVGAGDVG (KRAS G13D)
FVVFATDVH

SEQ ID NO: 84941 - protein, 9 aa, synthetic construct
  source 1..9: note = Seed: VVVGAGDVG (KRAS G13D)
FVVFATDVI

SEQ ID NO: 84942 - protein, 9 aa, synthetic construct
  source 1..9: note = Seed: VVVGAGDVG (KRAS G13D)
FVVFATDVK

SEQ ID NO: 84943 - protein, 9 aa, synthetic construct
  source 1..9: note = Seed: VVVGAGDVG (KRAS G13D)
FVVFATDVL

SEQ ID NO: 84944 - protein, 9 aa, synthetic construct
  source 1..9: note = Seed: VVVGAGDVG (KRAS G13D)
FVVFATDVM

SEQ ID NO: 84945 - protein, 9 aa, synthetic construct
  source 1..9: note = Seed: VVVGAGDVG (KRAS G13D)
FVVFATDVN

SEQ ID NO: 84946 - protein, 9 aa, synthetic construct
  source 1..9: note = Seed: VVVGAGDVG (KRAS G13D)
FVVFATDVP

SEQ ID NO: 84947 - protein, 9 aa, synthetic construct
  source 1..9: note = Seed: VVVGAGDVG (KRAS G13D)
FVVFATDVQ

SEQ ID NO: 84948 - protein, 9 aa, synthetic construct
  source 1..9: note = Seed: VVVGAGDVG (KRAS G13D)
FVVFATDVR

SEQ ID NO: 84949 - protein, 9 aa, synthetic construct
  source 1..9: note = Seed: VVVGAGDVG (KRAS G13D)
FVVFATDVS

SEQ ID NO: 84950 - protein, 9 aa, synthetic construct
  source 1..9: note = Seed: VVVGAGDVG (KRAS G13D)
FVVFATDVT

SEQ ID NO: 84951 - protein, 9 aa, synthetic construct
  source 1..9: note = Seed: VVVGAGDVG (KRAS G13D)
FVVFATDVV

SEQ ID NO: 84952 - protein, 9 aa, synthetic construct
  source 1..9: note = Seed: VVVGAGDVG (KRAS G13D)
FVVFATDVY

SEQ ID NO: 84953 - protein, 9 aa, synthetic construct
  source 1..9: note = Seed: VVVGAGDVG (KRAS G13D)
FVVFAVDVA

SEQ ID NO: 84954 - protein, 9 aa, synthetic construct
  source 1..9: note = Seed: VVVGAGDVG (KRAS G13D)
FVVFAVDVD

SEQ ID NO: 84955 - protein, 9 aa, synthetic construct
  source 1..9: note = Seed: VVVGAGDVG (KRAS G13D)
FVVFAVDVE

SEQ ID NO: 84956 - protein, 9 aa, synthetic construct
  source 1..9: note = Seed: VVVGAGDVG (KRAS G13D)
FVVFAVDVG

SEQ ID NO: 84957 - protein, 9 aa, synthetic construct
  source 1..9: note = Seed: VVVGAGDVG (KRAS G13D)
FVVFAVDVH

SEQ ID NO: 84958 - protein, 9 aa, synthetic construct
  source 1..9: note = Seed: VVVGAGDVG (KRAS G13D)
FVVFAVDVK

SEQ ID NO: 84959 - protein, 9 aa, synthetic construct
  source 1..9: note = Seed: VVVGAGDVG (KRAS G13D)
FVVFAVDVL

SEQ ID NO: 84960 - protein, 9 aa, synthetic construct
  source 1..9: note = Seed: VVVGAGDVG (KRAS G13D)
FVVFAVDVM

SEQ ID NO: 84961 - protein, 9 aa, synthetic construct
  source 1..9: note = Seed: VVVGAGDVG (KRAS G13D)
FVVFAVDVN

SEQ ID NO: 84962 - protein, 9 aa, synthetic construct
  source 1..9: note = Seed: VVVGAGDVG (KRAS G13D)
FVVFAVDVQ

SEQ ID NO: 84963 - protein, 9 aa, synthetic construct
  source 1..9: note = Seed: VVVGAGDVG (KRAS G13D)
FVVFAVDVR

SEQ ID NO: 84964 - protein, 9 aa, synthetic construct
  source 1..9: note = Seed: VVVGAGDVG (KRAS G13D)
FVVFAVDVS

SEQ ID NO: 84965 - protein, 9 aa, synthetic construct
  source 1..9: note = Seed: VVVGAGDVG (KRAS G13D)
FVVFAVDVT

SEQ ID NO: 84966 - protein, 9 aa, synthetic construct
  source 1..9: note = Seed: VVVGAGDVG (KRAS G13D)
FVVFAVDVV

SEQ ID NO: 84967 - protein, 9 aa, synthetic construct
  source 1..9: note = Seed: VVVGAGDVG (KRAS G13D)
FVVFAVDVY

SEQ ID NO: 84968 - protein, 9 aa, synthetic construct
  source 1..9: note = Seed: VVVGAGDVG (KRAS G13D)
FVVGAADVA

SEQ ID NO: 84969 - protein, 9 aa, synthetic construct
  source 1..9: note = Seed: VVVGAGDVG (KRAS G13D)
FVVGAADVD

SEQ ID NO: 84970 - protein, 9 aa, synthetic construct
  source 1..9: note = Seed: VVVGAGDVG (KRAS G13D)
FVVGAADVE

SEQ ID NO: 84971 - protein, 9 aa, synthetic construct
  source 1..9: note = Seed: VVVGAGDVG (KRAS G13D)
FVVGAADVF

SEQ ID NO: 84972 - protein, 9 aa, synthetic construct
  source 1..9: note = Seed: VVVGAGDVG (KRAS G13D)
FVVGAADVG

SEQ ID NO: 84973 - protein, 9 aa, synthetic construct
  source 1..9: note = Seed: VVVGAGDVG (KRAS G13D)
FVVGAADVH

SEQ ID NO: 84974 - protein, 9 aa, synthetic construct
  source 1..9: note = Seed: VVVGAGDVG (KRAS G13D)
FVVGAADVI

SEQ ID NO: 84975 - protein, 9 aa, synthetic construct
  source 1..9: note = Seed: VVVGAGDVG (KRAS G13D)
FVVGAADVK

SEQ ID NO: 84976 - protein, 9 aa, synthetic construct
  source 1..9: note = Seed: VVVGAGDVG (KRAS G13D)
FVVGAADVL

SEQ ID NO: 84977 - protein, 9 aa, synthetic construct
  source 1..9: note = Seed: VVVGAGDVG (KRAS G13D)
FVVGAADVM

SEQ ID NO: 84978 - protein, 9 aa, synthetic construct
  source 1..9: note = Seed: VVVGAGDVG (KRAS G13D)
FVVGAADVN

SEQ ID NO: 84979 - protein, 9 aa, synthetic construct
  source 1..9: note = Seed: VVVGAGDVG (KRAS G13D)
FVVGAADVP

SEQ ID NO: 84980 - protein, 9 aa, synthetic construct
  source 1..9: note = Seed: VVVGAGDVG (KRAS G13D)
FVVGAADVQ

SEQ ID NO: 84981 - protein, 9 aa, synthetic construct
  source 1..9: note = Seed: VVVGAGDVG (KRAS G13D)
FVVGAADVR

SEQ ID NO: 84982 - protein, 9 aa, synthetic construct
  source 1..9: note = Seed: VVVGAGDVG (KRAS G13D)
FVVGAADVS

SEQ ID NO: 84983 - protein, 9 aa, synthetic construct
  source 1..9: note = Seed: VVVGAGDVG (KRAS G13D)
FVVGAADVT

SEQ ID NO: 84984 - protein, 9 aa, synthetic construct
  source 1..9: note = Seed: VVVGAGDVG (KRAS G13D)
FVVGAADVV

SEQ ID NO: 84985 - protein, 9 aa, synthetic construct
  source 1..9: note = Seed: VVVGAGDVG (KRAS G13D)
FVVGAADVW

SEQ ID NO: 84986 - protein, 9 aa, synthetic construct
  source 1..9: note = Seed: VVVGAGDVG (KRAS G13D)
FVVGAADVY

SEQ ID NO: 84987 - protein, 9 aa, synthetic construct
  source 1..9: note = Seed: VVVGAGDVG (KRAS G13D)
FVVGAEDVA

SEQ ID NO: 84988 - protein, 9 aa, synthetic construct
  source 1..9: note = Seed: VVVGAGDVG (KRAS G13D)
FVVGAGDVA

SEQ ID NO: 84989 - protein, 9 aa, synthetic construct
  source 1..9: note = Seed: VVVGAGDVG (KRAS G13D)
FVVGAGDVL

SEQ ID NO: 84990 - protein, 9 aa, synthetic construct
  source 1..9: note = Seed: VVVGAGDVG (KRAS G13D)
FVVGAGDVM

SEQ ID NO: 84991 - protein, 9 aa, synthetic construct
  source 1..9: note = Seed: VVVGAGDVG (KRAS G13D)
FVVGAGDVN

SEQ ID NO: 84992 - protein, 9 aa, synthetic construct
  source 1..9: note = Seed: VVVGAGDVG (KRAS G13D)
FVVGAGDVS

SEQ ID NO: 84993 - protein, 9 aa, synthetic construct
  source 1..9: note = Seed: VVVGAGDVG (KRAS G13D)
FVVGAHDVA

SEQ ID NO: 84994 - protein, 9 aa, synthetic construct
  source 1..9: note = Seed: VVVGAGDVG (KRAS G13D)
FVVGAHDVS

SEQ ID NO: 84995 - protein, 9 aa, synthetic construct
  source 1..9: note = Seed: VVVGAGDVG (KRAS G13D)
FVVGAIDVA

SEQ ID NO: 84996 - protein, 9 aa, synthetic construct
  source 1..9: note = Seed: VVVGAGDVG (KRAS G13D)
FVVGAIDVG

SEQ ID NO: 84997 - protein, 9 aa, synthetic construct
  source 1..9: note = Seed: VVVGAGDVG (KRAS G13D)
FVVGAIDVH

SEQ ID NO: 84998 - protein, 9 aa, synthetic construct
  source 1..9: note = Seed: VVVGAGDVG (KRAS G13D)
FVVGAIDVI

SEQ ID NO: 84999 - protein, 9 aa, synthetic construct
  source 1..9: note = Seed: VVVGAGDVG (KRAS G13D)
FVVGAIDVL

SEQ ID NO: 85000 - protein, 9 aa, synthetic construct
  source 1..9: note = Seed: VVVGAGDVG (KRAS G13D)
FVVGAIDVM

SEQ ID NO: 85001 - protein, 9 aa, synthetic construct
  source 1..9: note = Seed: VVVGAGDVG (KRAS G13D)
FVVGAIDVN

SEQ ID NO: 85002 - protein, 9 aa, synthetic construct
  source 1..9: note = Seed: VVVGAGDVG (KRAS G13D)
FVVGAIDVP

SEQ ID NO: 85003 - protein, 9 aa, synthetic construct
  source 1..9: note = Seed: VVVGAGDVG (KRAS G13D)
FVVGAIDVQ

SEQ ID NO: 85004 - protein, 9 aa, synthetic construct
  source 1..9: note = Seed: VVVGAGDVG (KRAS G13D)
FVVGAIDVS

SEQ ID NO: 85005 - protein, 9 aa, synthetic construct
  source 1..9: note = Seed: VVVGAGDVG (KRAS G13D)
FVVGAIDVT

SEQ ID NO: 85006 - protein, 9 aa, synthetic construct
  source 1..9: note = Seed: VVVGAGDVG (KRAS G13D)
FVVGAIDVV

SEQ ID NO: 85007 - protein, 9 aa, synthetic construct
  source 1..9: note = Seed: VVVGAGDVG (KRAS G13D)
FVVGAIDVY

SEQ ID NO: 85008 - protein, 9 aa, synthetic construct
  source 1..9: note = Seed: VVVGAGDVG (KRAS G13D)
FVVGALDVA

SEQ ID NO: 85009 - protein, 9 aa, synthetic construct
  source 1..9: note = Seed: VVVGAGDVG (KRAS G13D)
FVVGALDVM

SEQ ID NO: 85010 - protein, 9 aa, synthetic construct
  source 1..9: note = Seed: VVVGAGDVG (KRAS G13D)
FVVGALDVN

SEQ ID NO: 85011 - protein, 9 aa, synthetic construct
  source 1..9: note = Seed: VVVGAGDVG (KRAS G13D)
FVVGALDVS

SEQ ID NO: 85012 - protein, 9 aa, synthetic construct
  source 1..9: note = Seed: VVVGAGDVG (KRAS G13D)
FVVGALDVT

SEQ ID NO: 85013 - protein, 9 aa, synthetic construct
  source 1..9: note = Seed: VVVGAGDVG (KRAS G13D)
FVVGAMDVS

SEQ ID NO: 85014 - protein, 9 aa, synthetic construct
  source 1..9: note = Seed: VVVGAGDVG (KRAS G13D)
FVVGANDVA

SEQ ID NO: 85015 - protein, 9 aa, synthetic construct
  source 1..9: note = Seed: VVVGAGDVG (KRAS G13D)
FVVGANDVD

SEQ ID NO: 85016 - protein, 9 aa, synthetic construct
  source 1..9: note = Seed: VVVGAGDVG (KRAS G13D)
FVVGANDVE

SEQ ID NO: 85017 - protein, 9 aa, synthetic construct
  source 1..9: note = Seed: VVVGAGDVG (KRAS G13D)
FVVGANDVG

SEQ ID NO: 85018 - protein, 9 aa, synthetic construct
  source 1..9: note = Seed: VVVGAGDVG (KRAS G13D)
FVVGANDVH

SEQ ID NO: 85019 - protein, 9 aa, synthetic construct
  source 1..9: note = Seed: VVVGAGDVG (KRAS G13D)
FVVGANDVI

SEQ ID NO: 85020 - protein, 9 aa, synthetic construct
  source 1..9: note = Seed: VVVGAGDVG (KRAS G13D)
FVVGANDVL

SEQ ID NO: 85021 - protein, 9 aa, synthetic construct
  source 1..9: note = Seed: VVVGAGDVG (KRAS G13D)
FVVGANDVM

SEQ ID NO: 85022 - protein, 9 aa, synthetic construct
  source 1..9: note = Seed: VVVGAGDVG (KRAS G13D)
FVVGANDVN

SEQ ID NO: 85023 - protein, 9 aa, synthetic construct
  source 1..9: note = Seed: VVVGAGDVG (KRAS G13D)
FVVGANDVQ

SEQ ID NO: 85024 - protein, 9 aa, synthetic construct
  source 1..9: note = Seed: VVVGAGDVG (KRAS G13D)
FVVGANDVS

SEQ ID NO: 85025 - protein, 9 aa, synthetic construct
  source 1..9: note = Seed: VVVGAGDVG (KRAS G13D)
FVVGANDVT

SEQ ID NO: 85026 - protein, 9 aa, synthetic construct
  source 1..9: note = Seed: VVVGAGDVG (KRAS G13D)
FVVGANDVV

SEQ ID NO: 85027 - protein, 9 aa, synthetic construct
  source 1..9: note = Seed: VVVGAGDVG (KRAS G13D)
FVVGANDVY

SEQ ID NO: 85028 - protein, 9 aa, synthetic construct
  source 1..9: note = Seed: VVVGAGDVG (KRAS G13D)
FVVGAPDVA

SEQ ID NO: 85029 - protein, 9 aa, synthetic construct
  source 1..9: note = Seed: VVVGAGDVG (KRAS G13D)
FVVGAPDVF

SEQ ID NO: 85030 - protein, 9 aa, synthetic construct
  source 1..9: note = Seed: VVVGAGDVG (KRAS G13D)
FVVGAPDVG

SEQ ID NO: 85031 - protein, 9 aa, synthetic construct
  source 1..9: note = Seed: VVVGAGDVG (KRAS G13D)
FVVGAPDVH

SEQ ID NO: 85032 - protein, 9 aa, synthetic construct
  source 1..9: note = Seed: VVVGAGDVG (KRAS G13D)
FVVGAPDVI

SEQ ID NO: 85033 - protein, 9 aa, synthetic construct
  source 1..9: note = Seed: VVVGAGDVG (KRAS G13D)
FVVGAPDVL

SEQ ID NO: 85034 - protein, 9 aa, synthetic construct
  source 1..9: note = Seed: VVVGAGDVG (KRAS G13D)
FVVGAPDVM

SEQ ID NO: 85035 - protein, 9 aa, synthetic construct
  source 1..9: note = Seed: VVVGAGDVG (KRAS G13D)
FVVGAPDVN

SEQ ID NO: 85036 - protein, 9 aa, synthetic construct
  source 1..9: note = Seed: VVVGAGDVG (KRAS G13D)
FVVGAPDVQ

SEQ ID NO: 85037 - protein, 9 aa, synthetic construct
  source 1..9: note = Seed: VVVGAGDVG (KRAS G13D)
FVVGAPDVS

SEQ ID NO: 85038 - protein, 9 aa, synthetic construct
  source 1..9: note = Seed: VVVGAGDVG (KRAS G13D)
FVVGAPDVT

SEQ ID NO: 85039 - protein, 9 aa, synthetic construct
  source 1..9: note = Seed: VVVGAGDVG (KRAS G13D)
FVVGAPDVV

SEQ ID NO: 85040 - protein, 9 aa, synthetic construct
  source 1..9: note = Seed: VVVGAGDVG (KRAS G13D)
FVVGAPDVY

SEQ ID NO: 85041 - protein, 9 aa, synthetic construct
  source 1..9: note = Seed: VVVGAGDVG (KRAS G13D)
FVVGAQDVA

SEQ ID NO: 85042 - protein, 9 aa, synthetic construct
  source 1..9: note = Seed: VVVGAGDVG (KRAS G13D)
FVVGAQDVS

SEQ ID NO: 85043 - protein, 9 aa, synthetic construct
  source 1..9: note = Seed: VVVGAGDVG (KRAS G13D)
FVVGASDVA

SEQ ID NO: 85044 - protein, 9 aa, synthetic construct
  source 1..9: note = Seed: VVVGAGDVG (KRAS G13D)
FVVGASDVG

SEQ ID NO: 85045 - protein, 9 aa, synthetic construct
  source 1..9: note = Seed: VVVGAGDVG (KRAS G13D)
FVVGASDVH

SEQ ID NO: 85046 - protein, 9 aa, synthetic construct
  source 1..9: note = Seed: VVVGAGDVG (KRAS G13D)
FVVGASDVI

SEQ ID NO: 85047 - protein, 9 aa, synthetic construct
  source 1..9: note = Seed: VVVGAGDVG (KRAS G13D)
FVVGASDVK

SEQ ID NO: 85048 - protein, 9 aa, synthetic construct
  source 1..9: note = Seed: VVVGAGDVG (KRAS G13D)
FVVGASDVL

SEQ ID NO: 85049 - protein, 9 aa, synthetic construct
  source 1..9: note = Seed: VVVGAGDVG (KRAS G13D)
FVVGASDVM

SEQ ID NO: 85050 - protein, 9 aa, synthetic construct
  source 1..9: note = Seed: VVVGAGDVG (KRAS G13D)
FVVGASDVN

SEQ ID NO: 85051 - protein, 9 aa, synthetic construct
  source 1..9: note = Seed: VVVGAGDVG (KRAS G13D)
FVVGASDVP

SEQ ID NO: 85052 - protein, 9 aa, synthetic construct
  source 1..9: note = Seed: VVVGAGDVG (KRAS G13D)
FVVGASDVQ

SEQ ID NO: 85053 - protein, 9 aa, synthetic construct
  source 1..9: note = Seed: VVVGAGDVG (KRAS G13D)
FVVGASDVR

SEQ ID NO: 85054 - protein, 9 aa, synthetic construct
  source 1..9: note = Seed: VVVGAGDVG (KRAS G13D)
FVVGASDVS

SEQ ID NO: 85055 - protein, 9 aa, synthetic construct
  source 1..9: note = Seed: VVVGAGDVG (KRAS G13D)
FVVGASDVT

SEQ ID NO: 85056 - protein, 9 aa, synthetic construct
  source 1..9: note = Seed: VVVGAGDVG (KRAS G13D)
FVVGASDVV

SEQ ID NO: 85057 - protein, 9 aa, synthetic construct
  source 1..9: note = Seed: VVVGAGDVG (KRAS G13D)
FVVGASDVY

SEQ ID NO: 85058 - protein, 9 aa, synthetic construct
  source 1..9: note = Seed: VVVGAGDVG (KRAS G13D)
FVVGATDVA

SEQ ID NO: 85059 - protein, 9 aa, synthetic construct
  source 1..9: note = Seed: VVVGAGDVG (KRAS G13D)
FVVGATDVG

SEQ ID NO: 85060 - protein, 9 aa, synthetic construct
  source 1..9: note = Seed: VVVGAGDVG (KRAS G13D)
FVVGATDVH

SEQ ID NO: 85061 - protein, 9 aa, synthetic construct
  source 1..9: note = Seed: VVVGAGDVG (KRAS G13D)
FVVGATDVI

SEQ ID NO: 85062 - protein, 9 aa, synthetic construct
  source 1..9: note = Seed: VVVGAGDVG (KRAS G13D)
FVVGATDVK

SEQ ID NO: 85063 - protein, 9 aa, synthetic construct
  source 1..9: note = Seed: VVVGAGDVG (KRAS G13D)
FVVGATDVL

SEQ ID NO: 85064 - protein, 9 aa, synthetic construct
  source 1..9: note = Seed: VVVGAGDVG (KRAS G13D)
FVVGATDVM

SEQ ID NO: 85065 - protein, 9 aa, synthetic construct
  source 1..9: note = Seed: VVVGAGDVG (KRAS G13D)
FVVGATDVN

SEQ ID NO: 85066 - protein, 9 aa, synthetic construct
  source 1..9: note = Seed: VVVGAGDVG (KRAS G13D)
FVVGATDVQ

SEQ ID NO: 85067 - protein, 9 aa, synthetic construct
  source 1..9: note = Seed: VVVGAGDVG (KRAS G13D)
FVVGATDVR

SEQ ID NO: 85068 - protein, 9 aa, synthetic construct
  source 1..9: note = Seed: VVVGAGDVG (KRAS G13D)
FVVGATDVS

SEQ ID NO: 85069 - protein, 9 aa, synthetic construct
  source 1..9: note = Seed: VVVGAGDVG (KRAS G13D)
FVVGATDVT

SEQ ID NO: 85070 - protein, 9 aa, synthetic construct
  source 1..9: note = Seed: VVVGAGDVG (KRAS G13D)
FVVGATDVV

SEQ ID NO: 85071 - protein, 9 aa, synthetic construct
  source 1..9: note = Seed: VVVGAGDVG (KRAS G13D)
FVVGATDVY

SEQ ID NO: 85072 - protein, 9 aa, synthetic construct
  source 1..9: note = Seed: VVVGAGDVG (KRAS G13D)
FVVGAVDVA

SEQ ID NO: 85073 - protein, 9 aa, synthetic construct
  source 1..9: note = Seed: VVVGAGDVG (KRAS G13D)
FVVGAVDVE

SEQ ID NO: 85074 - protein, 9 aa, synthetic construct
  source 1..9: note = Seed: VVVGAGDVG (KRAS G13D)
FVVGAVDVG

SEQ ID NO: 85075 - protein, 9 aa, synthetic construct
  source 1..9: note = Seed: VVVGAGDVG (KRAS G13D)
FVVGAVDVH

SEQ ID NO: 85076 - protein, 9 aa, synthetic construct
  source 1..9: note = Seed: VVVGAGDVG (KRAS G13D)
FVVGAVDVI

SEQ ID NO: 85077 - protein, 9 aa, synthetic construct
  source 1..9: note = Seed: VVVGAGDVG (KRAS G13D)
FVVGAVDVK

SEQ ID NO: 85078 - protein, 9 aa, synthetic construct
  source 1..9: note = Seed: VVVGAGDVG (KRAS G13D)
FVVGAVDVL

SEQ ID NO: 85079 - protein, 9 aa, synthetic construct
  source 1..9: note = Seed: VVVGAGDVG (KRAS G13D)
FVVGAVDVM

SEQ ID NO: 85080 - protein, 9 aa, synthetic construct
  source 1..9: note = Seed: VVVGAGDVG (KRAS G13D)
FVVGAVDVN

SEQ ID NO: 85081 - protein, 9 aa, synthetic construct
  source 1..9: note = Seed: VVVGAGDVG (KRAS G13D)
FVVGAVDVP

SEQ ID NO: 85082 - protein, 9 aa, synthetic construct
  source 1..9: note = Seed: VVVGAGDVG (KRAS G13D)
FVVGAVDVQ

SEQ ID NO: 85083 - protein, 9 aa, synthetic construct
  source 1..9: note = Seed: VVVGAGDVG (KRAS G13D)
FVVGAVDVR

SEQ ID NO: 85084 - protein, 9 aa, synthetic construct
  source 1..9: note = Seed: VVVGAGDVG (KRAS G13D)
FVVGAVDVS

SEQ ID NO: 85085 - protein, 9 aa, synthetic construct
  source 1..9: note = Seed: VVVGAGDVG (KRAS G13D)
FVVGAVDVT

SEQ ID NO: 85086 - protein, 9 aa, synthetic construct
  source 1..9: note = Seed: VVVGAGDVG (KRAS G13D)
FVVGAVDVV

SEQ ID NO: 85087 - protein, 9 aa, synthetic construct
  source 1..9: note = Seed: VVVGAGDVG (KRAS G13D)
FVVGAVDVY

SEQ ID NO: 85088 - protein, 9 aa, synthetic construct
  source 1..9: note = Seed: VVVGAGDVG (KRAS G13D)
FVVHAADVA

SEQ ID NO: 85089 - protein, 9 aa, synthetic construct
  source 1..9: note = Seed: VVVGAGDVG (KRAS G13D)
FVVHAADVC

SEQ ID NO: 85090 - protein, 9 aa, synthetic construct
  source 1..9: note = Seed: VVVGAGDVG (KRAS G13D)
FVVHAADVD

SEQ ID NO: 85091 - protein, 9 aa, synthetic construct
  source 1..9: note = Seed: VVVGAGDVG (KRAS G13D)
FVVHAADVE

SEQ ID NO: 85092 - protein, 9 aa, synthetic construct
  source 1..9: note = Seed: VVVGAGDVG (KRAS G13D)
FVVHAADVF

SEQ ID NO: 85093 - protein, 9 aa, synthetic construct
  source 1..9: note = Seed: VVVGAGDVG (KRAS G13D)
FVVHAADVG

SEQ ID NO: 85094 - protein, 9 aa, synthetic construct
  source 1..9: note = Seed: VVVGAGDVG (KRAS G13D)
FVVHAADVH

SEQ ID NO: 85095 - protein, 9 aa, synthetic construct
  source 1..9: note = Seed: VVVGAGDVG (KRAS G13D)
FVVHAADVI

SEQ ID NO: 85096 - protein, 9 aa, synthetic construct
  source 1..9: note = Seed: VVVGAGDVG (KRAS G13D)
FVVHAADVL

SEQ ID NO: 85097 - protein, 9 aa, synthetic construct
  source 1..9: note = Seed: VVVGAGDVG (KRAS G13D)
FVVHAADVM

SEQ ID NO: 85098 - protein, 9 aa, synthetic construct
  source 1..9: note = Seed: VVVGAGDVG (KRAS G13D)
FVVHAADVN

SEQ ID NO: 85099 - protein, 9 aa, synthetic construct
  source 1..9: note = Seed: VVVGAGDVG (KRAS G13D)
FVVHAADVQ

SEQ ID NO: 85100 - protein, 9 aa, synthetic construct
  source 1..9: note = Seed: VVVGAGDVG (KRAS G13D)
FVVHAADVR

SEQ ID NO: 85101 - protein, 9 aa, synthetic construct
  source 1..9: note = Seed: VVVGAGDVG (KRAS G13D)
FVVHAADVS

SEQ ID NO: 85102 - protein, 9 aa, synthetic construct
  source 1..9: note = Seed: VVVGAGDVG (KRAS G13D)
FVVHAADVT

SEQ ID NO: 85103 - protein, 9 aa, synthetic construct
  source 1..9: note = Seed: VVVGAGDVG (KRAS G13D)
FVVHAADVV

SEQ ID NO: 85104 - protein, 9 aa, synthetic construct
  source 1..9: note = Seed: VVVGAGDVG (KRAS G13D)
FVVHACDVA

SEQ ID NO: 85105 - protein, 9 aa, synthetic construct
  source 1..9: note = Seed: VVVGAGDVG (KRAS G13D)
FVVHADDVA

SEQ ID NO: 85106 - protein, 9 aa, synthetic construct
  source 1..9: note = Seed: VVVGAGDVG (KRAS G13D)
FVVHADDVF

SEQ ID NO: 85107 - protein, 9 aa, synthetic construct
  source 1..9: note = Seed: VVVGAGDVG (KRAS G13D)
FVVHADDVI

SEQ ID NO: 85108 - protein, 9 aa, synthetic construct
  source 1..9: note = Seed: VVVGAGDVG (KRAS G13D)
FVVHADDVL

SEQ ID NO: 85109 - protein, 9 aa, synthetic construct
  source 1..9: note = Seed: VVVGAGDVG (KRAS G13D)
FVVHADDVM

SEQ ID NO: 85110 - protein, 9 aa, synthetic construct
  source 1..9: note = Seed: VVVGAGDVG (KRAS G13D)
FVVHADDVV

SEQ ID NO: 85111 - protein, 9 aa, synthetic construct
  source 1..9: note = Seed: VVVGAGDVG (KRAS G13D)
FVVHAEDVS

SEQ ID NO: 85112 - protein, 9 aa, synthetic construct
  source 1..9: note = Seed: VVVGAGDVG (KRAS G13D)
FVVHAGDVA

SEQ ID NO: 85113 - protein, 9 aa, synthetic construct
  source 1..9: note = Seed: VVVGAGDVG (KRAS G13D)
FVVHAGDVH

SEQ ID NO: 85114 - protein, 9 aa, synthetic construct
  source 1..9: note = Seed: VVVGAGDVG (KRAS G13D)
FVVHAGDVI

SEQ ID NO: 85115 - protein, 9 aa, synthetic construct
  source 1..9: note = Seed: VVVGAGDVG (KRAS G13D)
FVVHAGDVL

SEQ ID NO: 85116 - protein, 9 aa, synthetic construct
  source 1..9: note = Seed: VVVGAGDVG (KRAS G13D)
FVVHAGDVM

SEQ ID NO: 85117 - protein, 9 aa, synthetic construct
  source 1..9: note = Seed: VVVGAGDVG (KRAS G13D)
FVVHAGDVN

SEQ ID NO: 85118 - protein, 9 aa, synthetic construct
  source 1..9: note = Seed: VVVGAGDVG (KRAS G13D)
FVVHAGDVS

SEQ ID NO: 85119 - protein, 9 aa, synthetic construct
  source 1..9: note = Seed: VVVGAGDVG (KRAS G13D)
FVVHAGDVV

SEQ ID NO: 85120 - protein, 9 aa, synthetic construct
  source 1..9: note = Seed: VVVGAGDVG (KRAS G13D)
FVVHAIDVA

SEQ ID NO: 85121 - protein, 9 aa, synthetic construct
  source 1..9: note = Seed: VVVGAGDVG (KRAS G13D)
FVVHAIDVC

SEQ ID NO: 85122 - protein, 9 aa, synthetic construct
  source 1..9: note = Seed: VVVGAGDVG (KRAS G13D)
FVVHAIDVG

SEQ ID NO: 85123 - protein, 9 aa, synthetic construct
  source 1..9: note = Seed: VVVGAGDVG (KRAS G13D)
FVVHAIDVI

SEQ ID NO: 85124 - protein, 9 aa, synthetic construct
  source 1..9: note = Seed: VVVGAGDVG (KRAS G13D)
FVVHAIDVM

SEQ ID NO: 85125 - protein, 9 aa, synthetic construct
  source 1..9: note = Seed: VVVGAGDVG (KRAS G13D)
FVVHAIDVN

SEQ ID NO: 85126 - protein, 9 aa, synthetic construct
  source 1..9: note = Seed: VVVGAGDVG (KRAS G13D)
FVVHAIDVS

SEQ ID NO: 85127 - protein, 9 aa, synthetic construct
  source 1..9: note = Seed: VVVGAGDVG (KRAS G13D)
FVVHAIDVV

SEQ ID NO: 85128 - protein, 9 aa, synthetic construct
  source 1..9: note = Seed: VVVGAGDVG (KRAS G13D)
FVVHALDVA

SEQ ID NO: 85129 - protein, 9 aa, synthetic construct
  source 1..9: note = Seed: VVVGAGDVG (KRAS G13D)
FVVHALDVI

SEQ ID NO: 85130 - protein, 9 aa, synthetic construct
  source 1..9: note = Seed: VVVGAGDVG (KRAS G13D)
FVVHALDVL

SEQ ID NO: 85131 - protein, 9 aa, synthetic construct
  source 1..9: note = Seed: VVVGAGDVG (KRAS G13D)
FVVHALDVM

SEQ ID NO: 85132 - protein, 9 aa, synthetic construct
  source 1..9: note = Seed: VVVGAGDVG (KRAS G13D)
FVVHALDVS

SEQ ID NO: 85133 - protein, 9 aa, synthetic construct
  source 1..9: note = Seed: VVVGAGDVG (KRAS G13D)
FVVHALDVV

SEQ ID NO: 85134 - protein, 9 aa, synthetic construct
  source 1..9: note = Seed: VVVGAGDVG (KRAS G13D)
FVVHANDVA

SEQ ID NO: 85135 - protein, 9 aa, synthetic construct
  source 1..9: note = Seed: VVVGAGDVG (KRAS G13D)
FVVHANDVC

SEQ ID NO: 85136 - protein, 9 aa, synthetic construct
  source 1..9: note = Seed: VVVGAGDVG (KRAS G13D)
FVVHANDVD

SEQ ID NO: 85137 - protein, 9 aa, synthetic construct
  source 1..9: note = Seed: VVVGAGDVG (KRAS G13D)
FVVHANDVF

SEQ ID NO: 85138 - protein, 9 aa, synthetic construct
  source 1..9: note = Seed: VVVGAGDVG (KRAS G13D)
FVVHANDVG

SEQ ID NO: 85139 - protein, 9 aa, synthetic construct
  source 1..9: note = Seed: VVVGAGDVG (KRAS G13D)
FVVHANDVH

SEQ ID NO: 85140 - protein, 9 aa, synthetic construct
  source 1..9: note = Seed: VVVGAGDVG (KRAS G13D)
FVVHANDVI

SEQ ID NO: 85141 - protein, 9 aa, synthetic construct
  source 1..9: note = Seed: VVVGAGDVG (KRAS G13D)
FVVHANDVL

SEQ ID NO: 85142 - protein, 9 aa, synthetic construct
  source 1..9: note = Seed: VVVGAGDVG (KRAS G13D)
FVVHANDVM

SEQ ID NO: 85143 - protein, 9 aa, synthetic construct
  source 1..9: note = Seed: VVVGAGDVG (KRAS G13D)
FVVHANDVN

SEQ ID NO: 85144 - protein, 9 aa, synthetic construct
  source 1..9: note = Seed: VVVGAGDVG (KRAS G13D)
FVVHANDVQ

SEQ ID NO: 85145 - protein, 9 aa, synthetic construct
  source 1..9: note = Seed: VVVGAGDVG (KRAS G13D)
FVVHANDVS

SEQ ID NO: 85146 - protein, 9 aa, synthetic construct
  source 1..9: note = Seed: VVVGAGDVG (KRAS G13D)
FVVHANDVT

SEQ ID NO: 85147 - protein, 9 aa, synthetic construct
  source 1..9: note = Seed: VVVGAGDVG (KRAS G13D)
FVVHANDVV

SEQ ID NO: 85148 - protein, 9 aa, synthetic construct
  source 1..9: note = Seed: VVVGAGDVG (KRAS G13D)
FVVHANDVY

SEQ ID NO: 85149 - protein, 9 aa, synthetic construct
  source 1..9: note = Seed: VVVGAGDVG (KRAS G13D)
FVVHAPDVA

SEQ ID NO: 85150 - protein, 9 aa, synthetic construct
  source 1..9: note = Seed: VVVGAGDVG (KRAS G13D)
FVVHAPDVG

SEQ ID NO: 85151 - protein, 9 aa, synthetic construct
  source 1..9: note = Seed: VVVGAGDVG (KRAS G13D)
FVVHAPDVH

SEQ ID NO: 85152 - protein, 9 aa, synthetic construct
  source 1..9: note = Seed: VVVGAGDVG (KRAS G13D)
FVVHAPDVI

SEQ ID NO: 85153 - protein, 9 aa, synthetic construct
  source 1..9: note = Seed: VVVGAGDVG (KRAS G13D)
FVVHAPDVL

SEQ ID NO: 85154 - protein, 9 aa, synthetic construct
  source 1..9: note = Seed: VVVGAGDVG (KRAS G13D)
FVVHAPDVM

SEQ ID NO: 85155 - protein, 9 aa, synthetic construct
  source 1..9: note = Seed: VVVGAGDVG (KRAS G13D)
FVVHAPDVN

SEQ ID NO: 85156 - protein, 9 aa, synthetic construct
  source 1..9: note = Seed: VVVGAGDVG (KRAS G13D)
FVVHAPDVP

SEQ ID NO: 85157 - protein, 9 aa, synthetic construct
  source 1..9: note = Seed: VVVGAGDVG (KRAS G13D)
FVVHAPDVQ

SEQ ID NO: 85158 - protein, 9 aa, synthetic construct
  source 1..9: note = Seed: VVVGAGDVG (KRAS G13D)
FVVHAPDVS

SEQ ID NO: 85159 - protein, 9 aa, synthetic construct
  source 1..9: note = Seed: VVVGAGDVG (KRAS G13D)
FVVHAPDVT

SEQ ID NO: 85160 - protein, 9 aa, synthetic construct
  source 1..9: note = Seed: VVVGAGDVG (KRAS G13D)
FVVHAPDVV

SEQ ID NO: 85161 - protein, 9 aa, synthetic construct
  source 1..9: note = Seed: VVVGAGDVG (KRAS G13D)
FVVHAPDVW

SEQ ID NO: 85162 - protein, 9 aa, synthetic construct
  source 1..9: note = Seed: VVVGAGDVG (KRAS G13D)
FVVHAPDVY

SEQ ID NO: 85163 - protein, 9 aa, synthetic construct
  source 1..9: note = Seed: VVVGAGDVG (KRAS G13D)
FVVHASDVA

SEQ ID NO: 85164 - protein, 9 aa, synthetic construct
  source 1..9: note = Seed: VVVGAGDVG (KRAS G13D)
FVVHASDVD

SEQ ID NO: 85165 - protein, 9 aa, synthetic construct
  source 1..9: note = Seed: VVVGAGDVG (KRAS G13D)
FVVHASDVE

SEQ ID NO: 85166 - protein, 9 aa, synthetic construct
  source 1..9: note = Seed: VVVGAGDVG (KRAS G13D)
FVVHASDVF

SEQ ID NO: 85167 - protein, 9 aa, synthetic construct
  source 1..9: note = Seed: VVVGAGDVG (KRAS G13D)
FVVHASDVG

SEQ ID NO: 85168 - protein, 9 aa, synthetic construct
  source 1..9: note = Seed: VVVGAGDVG (KRAS G13D)
FVVHASDVH

SEQ ID NO: 85169 - protein, 9 aa, synthetic construct
  source 1..9: note = Seed: VVVGAGDVG (KRAS G13D)
FVVHASDVI

SEQ ID NO: 85170 - protein, 9 aa, synthetic construct
  source 1..9: note = Seed: VVVGAGDVG (KRAS G13D)
FVVHASDVL

SEQ ID NO: 85171 - protein, 9 aa, synthetic construct
  source 1..9: note = Seed: VVVGAGDVG (KRAS G13D)
FVVHASDVM

SEQ ID NO: 85172 - protein, 9 aa, synthetic construct
  source 1..9: note = Seed: VVVGAGDVG (KRAS G13D)
FVVHASDVN

SEQ ID NO: 85173 - protein, 9 aa, synthetic construct
  source 1..9: note = Seed: VVVGAGDVG (KRAS G13D)
FVVHASDVP

SEQ ID NO: 85174 - protein, 9 aa, synthetic construct
  source 1..9: note = Seed: VVVGAGDVG (KRAS G13D)
FVVHASDVQ

SEQ ID NO: 85175 - protein, 9 aa, synthetic construct
  source 1..9: note = Seed: VVVGAGDVG (KRAS G13D)
FVVHASDVS

SEQ ID NO: 85176 - protein, 9 aa, synthetic construct
  source 1..9: note = Seed: VVVGAGDVG (KRAS G13D)
FVVHASDVT

SEQ ID NO: 85177 - protein, 9 aa, synthetic construct
  source 1..9: note = Seed: VVVGAGDVG (KRAS G13D)
FVVHASDVV

SEQ ID NO: 85178 - protein, 9 aa, synthetic construct
  source 1..9: note = Seed: VVVGAGDVG (KRAS G13D)
FVVHASDVY

SEQ ID NO: 85179 - protein, 9 aa, synthetic construct
  source 1..9: note = Seed: VVVGAGDVG (KRAS G13D)
FVVHATDVA

SEQ ID NO: 85180 - protein, 9 aa, synthetic construct
  source 1..9: note = Seed: VVVGAGDVG (KRAS G13D)
FVVHATDVD

SEQ ID NO: 85181 - protein, 9 aa, synthetic construct
  source 1..9: note = Seed: VVVGAGDVG (KRAS G13D)
FVVHATDVE

SEQ ID NO: 85182 - protein, 9 aa, synthetic construct
  source 1..9: note = Seed: VVVGAGDVG (KRAS G13D)
FVVHATDVF

SEQ ID NO: 85183 - protein, 9 aa, synthetic construct
  source 1..9: note = Seed: VVVGAGDVG (KRAS G13D)
FVVHATDVG

SEQ ID NO: 85184 - protein, 9 aa, synthetic construct
  source 1..9: note = Seed: VVVGAGDVG (KRAS G13D)
FVVHATDVH

SEQ ID NO: 85185 - protein, 9 aa, synthetic construct
  source 1..9: note = Seed: VVVGAGDVG (KRAS G13D)
FVVHATDVI

SEQ ID NO: 85186 - protein, 9 aa, synthetic construct
  source 1..9: note = Seed: VVVGAGDVG (KRAS G13D)
FVVHATDVL

SEQ ID NO: 85187 - protein, 9 aa, synthetic construct
  source 1..9: note = Seed: VVVGAGDVG (KRAS G13D)
FVVHATDVM

SEQ ID NO: 85188 - protein, 9 aa, synthetic construct
  source 1..9: note = Seed: VVVGAGDVG (KRAS G13D)
FVVHATDVN

SEQ ID NO: 85189 - protein, 9 aa, synthetic construct
  source 1..9: note = Seed: VVVGAGDVG (KRAS G13D)
FVVHATDVP

SEQ ID NO: 85190 - protein, 9 aa, synthetic construct
  source 1..9: note = Seed: VVVGAGDVG (KRAS G13D)
FVVHATDVQ

SEQ ID NO: 85191 - protein, 9 aa, synthetic construct
  source 1..9: note = Seed: VVVGAGDVG (KRAS G13D)
FVVHATDVS

SEQ ID NO: 85192 - protein, 9 aa, synthetic construct
  source 1..9: note = Seed: VVVGAGDVG (KRAS G13D)
FVVHATDVT

SEQ ID NO: 85193 - protein, 9 aa, synthetic construct
  source 1..9: note = Seed: VVVGAGDVG (KRAS G13D)
FVVHATDVV

SEQ ID NO: 85194 - protein, 9 aa, synthetic construct
  source 1..9: note = Seed: VVVGAGDVG (KRAS G13D)
FVVHATDVW

SEQ ID NO: 85195 - protein, 9 aa, synthetic construct
  source 1..9: note = Seed: VVVGAGDVG (KRAS G13D)
FVVHATDVY

SEQ ID NO: 85196 - protein, 9 aa, synthetic construct
  source 1..9: note = Seed: VVVGAGDVG (KRAS G13D)
FVVHAVDVA

SEQ ID NO: 85197 - protein, 9 aa, synthetic construct
  source 1..9: note = Seed: VVVGAGDVG (KRAS G13D)
FVVHAVDVD

SEQ ID NO: 85198 - protein, 9 aa, synthetic construct
  source 1..9: note = Seed: VVVGAGDVG (KRAS G13D)
FVVHAVDVE

SEQ ID NO: 85199 - protein, 9 aa, synthetic construct
  source 1..9: note = Seed: VVVGAGDVG (KRAS G13D)
FVVHAVDVG

SEQ ID NO: 85200 - protein, 9 aa, synthetic construct
  source 1..9: note = Seed: VVVGAGDVG (KRAS G13D)
FVVHAVDVH

SEQ ID NO: 85201 - protein, 9 aa, synthetic construct
  source 1..9: note = Seed: VVVGAGDVG (KRAS G13D)
FVVHAVDVI

SEQ ID NO: 85202 - protein, 9 aa, synthetic construct
  source 1..9: note = Seed: VVVGAGDVG (KRAS G13D)
FVVHAVDVL

SEQ ID NO: 85203 - protein, 9 aa, synthetic construct
  source 1..9: note = Seed: VVVGAGDVG (KRAS G13D)
FVVHAVDVM

SEQ ID NO: 85204 - protein, 9 aa, synthetic construct
  source 1..9: note = Seed: VVVGAGDVG (KRAS G13D)
FVVHAVDVN

SEQ ID NO: 85205 - protein, 9 aa, synthetic construct
  source 1..9: note = Seed: VVVGAGDVG (KRAS G13D)
FVVHAVDVQ

SEQ ID NO: 85206 - protein, 9 aa, synthetic construct
  source 1..9: note = Seed: VVVGAGDVG (KRAS G13D)
FVVHAVDVS

SEQ ID NO: 85207 - protein, 9 aa, synthetic construct
  source 1..9: note = Seed: VVVGAGDVG (KRAS G13D)
FVVHAVDVT

SEQ ID NO: 85208 - protein, 9 aa, synthetic construct
  source 1..9: note = Seed: VVVGAGDVG (KRAS G13D)
FVVHAVDVV

SEQ ID NO: 85209 - protein, 9 aa, synthetic construct
  source 1..9: note = Seed: VVVGAGDVG (KRAS G13D)
FVVHAVDVY

SEQ ID NO: 85210 - protein, 9 aa, synthetic construct
  source 1..9: note = Seed: VVVGAGDVG (KRAS G13D)
FVVIAADVA

SEQ ID NO: 85211 - protein, 9 aa, synthetic construct
  source 1..9: note = Seed: VVVGAGDVG (KRAS G13D)
FVVIAADVC

SEQ ID NO: 85212 - protein, 9 aa, synthetic construct
  source 1..9: note = Seed: VVVGAGDVG (KRAS G13D)
FVVIAADVD

SEQ ID NO: 85213 - protein, 9 aa, synthetic construct
  source 1..9: note = Seed: VVVGAGDVG (KRAS G13D)
FVVIAADVE

SEQ ID NO: 85214 - protein, 9 aa, synthetic construct
  source 1..9: note = Seed: VVVGAGDVG (KRAS G13D)
FVVIAADVF

SEQ ID NO: 85215 - protein, 9 aa, synthetic construct
  source 1..9: note = Seed: VVVGAGDVG (KRAS G13D)
FVVIAADVG

SEQ ID NO: 85216 - protein, 9 aa, synthetic construct
  source 1..9: note = Seed: VVVGAGDVG (KRAS G13D)
FVVIAADVH

SEQ ID NO: 85217 - protein, 9 aa, synthetic construct
  source 1..9: note = Seed: VVVGAGDVG (KRAS G13D)
FVVIAADVI

SEQ ID NO: 85218 - protein, 9 aa, synthetic construct
  source 1..9: note = Seed: VVVGAGDVG (KRAS G13D)
FVVIAADVK

SEQ ID NO: 85219 - protein, 9 aa, synthetic construct
  source 1..9: note = Seed: VVVGAGDVG (KRAS G13D)
FVVIAADVL

SEQ ID NO: 85220 - protein, 9 aa, synthetic construct
  source 1..9: note = Seed: VVVGAGDVG (KRAS G13D)
FVVIAADVM

SEQ ID NO: 85221 - protein, 9 aa, synthetic construct
  source 1..9: note = Seed: VVVGAGDVG (KRAS G13D)
FVVIAADVN

SEQ ID NO: 85222 - protein, 9 aa, synthetic construct
  source 1..9: note = Seed: VVVGAGDVG (KRAS G13D)
FVVIAADVP

SEQ ID NO: 85223 - protein, 9 aa, synthetic construct
  source 1..9: note = Seed: VVVGAGDVG (KRAS G13D)
FVVIAADVQ

SEQ ID NO: 85224 - protein, 9 aa, synthetic construct
  source 1..9: note = Seed: VVVGAGDVG (KRAS G13D)
FVVIAADVR

SEQ ID NO: 85225 - protein, 9 aa, synthetic construct
  source 1..9: note = Seed: VVVGAGDVG (KRAS G13D)
FVVIAADVS

SEQ ID NO: 85226 - protein, 9 aa, synthetic construct
  source 1..9: note = Seed: VVVGAGDVG (KRAS G13D)
FVVIAADVT

SEQ ID NO: 85227 - protein, 9 aa, synthetic construct
  source 1..9: note = Seed: VVVGAGDVG (KRAS G13D)
FVVIAADVV

SEQ ID NO: 85228 - protein, 9 aa, synthetic construct
  source 1..9: note = Seed: VVVGAGDVG (KRAS G13D)
FVVIAADVW

SEQ ID NO: 85229 - protein, 9 aa, synthetic construct
  source 1..9: note = Seed: VVVGAGDVG (KRAS G13D)
FVVIAADVY

SEQ ID NO: 85230 - protein, 9 aa, synthetic construct
  source 1..9: note = Seed: VVVGAGDVG (KRAS G13D)
FVVIACDVA

SEQ ID NO: 85231 - protein, 9 aa, synthetic construct
  source 1..9: note = Seed: VVVGAGDVG (KRAS G13D)
FVVIACDVH

SEQ ID NO: 85232 - protein, 9 aa, synthetic construct
  source 1..9: note = Seed: VVVGAGDVG (KRAS G13D)
FVVIACDVN

SEQ ID NO: 85233 - protein, 9 aa, synthetic construct
  source 1..9: note = Seed: VVVGAGDVG (KRAS G13D)
FVVIADDVA

SEQ ID NO: 85234 - protein, 9 aa, synthetic construct
  source 1..9: note = Seed: VVVGAGDVG (KRAS G13D)
FVVIADDVG

SEQ ID NO: 85235 - protein, 9 aa, synthetic construct
  source 1..9: note = Seed: VVVGAGDVG (KRAS G13D)
FVVIADDVH

SEQ ID NO: 85236 - protein, 9 aa, synthetic construct
  source 1..9: note = Seed: VVVGAGDVG (KRAS G13D)
FVVIADDVI

SEQ ID NO: 85237 - protein, 9 aa, synthetic construct
  source 1..9: note = Seed: VVVGAGDVG (KRAS G13D)
FVVIADDVL

SEQ ID NO: 85238 - protein, 9 aa, synthetic construct
  source 1..9: note = Seed: VVVGAGDVG (KRAS G13D)
FVVIADDVM

SEQ ID NO: 85239 - protein, 9 aa, synthetic construct
  source 1..9: note = Seed: VVVGAGDVG (KRAS G13D)
FVVIADDVN

SEQ ID NO: 85240 - protein, 9 aa, synthetic construct
  source 1..9: note = Seed: VVVGAGDVG (KRAS G13D)
FVVIADDVQ

SEQ ID NO: 85241 - protein, 9 aa, synthetic construct
  source 1..9: note = Seed: VVVGAGDVG (KRAS G13D)
FVVIADDVS

SEQ ID NO: 85242 - protein, 9 aa, synthetic construct
  source 1..9: note = Seed: VVVGAGDVG (KRAS G13D)
FVVIADDVT

SEQ ID NO: 85243 - protein, 9 aa, synthetic construct
  source 1..9: note = Seed: VVVGAGDVG (KRAS G13D)
FVVIADDVV

SEQ ID NO: 85244 - protein, 9 aa, synthetic construct
  source 1..9: note = Seed: VVVGAGDVG (KRAS G13D)
FVVIAEDVA

SEQ ID NO: 85245 - protein, 9 aa, synthetic construct
  source 1..9: note = Seed: VVVGAGDVG (KRAS G13D)
FVVIAEDVG

SEQ ID NO: 85246 - protein, 9 aa, synthetic construct
  source 1..9: note = Seed: VVVGAGDVG (KRAS G13D)
FVVIAEDVH

SEQ ID NO: 85247 - protein, 9 aa, synthetic construct
  source 1..9: note = Seed: VVVGAGDVG (KRAS G13D)
FVVIAEDVI

SEQ ID NO: 85248 - protein, 9 aa, synthetic construct
  source 1..9: note = Seed: VVVGAGDVG (KRAS G13D)
FVVIAEDVK

SEQ ID NO: 85249 - protein, 9 aa, synthetic construct
  source 1..9: note = Seed: VVVGAGDVG (KRAS G13D)
FVVIAEDVL

SEQ ID NO: 85250 - protein, 9 aa, synthetic construct
  source 1..9: note = Seed: VVVGAGDVG (KRAS G13D)
FVVIAEDVM

SEQ ID NO: 85251 - protein, 9 aa, synthetic construct
  source 1..9: note = Seed: VVVGAGDVG (KRAS G13D)
FVVIAEDVN

SEQ ID NO: 85252 - protein, 9 aa, synthetic construct
  source 1..9: note = Seed: VVVGAGDVG (KRAS G13D)
FVVIAEDVQ

SEQ ID NO: 85253 - protein, 9 aa, synthetic construct
  source 1..9: note = Seed: VVVGAGDVG (KRAS G13D)
FVVIAEDVR

SEQ ID NO: 85254 - protein, 9 aa, synthetic construct
  source 1..9: note = Seed: VVVGAGDVG (KRAS G13D)
FVVIAEDVS

SEQ ID NO: 85255 - protein, 9 aa, synthetic construct
  source 1..9: note = Seed: VVVGAGDVG (KRAS G13D)
FVVIAEDVT

SEQ ID NO: 85256 - protein, 9 aa, synthetic construct
  source 1..9: note = Seed: VVVGAGDVG (KRAS G13D)
FVVIAEDVV

SEQ ID NO: 85257 - protein, 9 aa, synthetic construct
  source 1..9: note = Seed: VVVGAGDVG (KRAS G13D)
FVVIAEDVY

SEQ ID NO: 85258 - protein, 9 aa, synthetic construct
  source 1..9: note = Seed: VVVGAGDVG (KRAS G13D)
FVVIAFDVN

SEQ ID NO: 85259 - protein, 9 aa, synthetic construct
  source 1..9: note = Seed: VVVGAGDVG (KRAS G13D)
FVVIAGDVA

SEQ ID NO: 85260 - protein, 9 aa, synthetic construct
  source 1..9: note = Seed: VVVGAGDVG (KRAS G13D)
FVVIAGDVD

SEQ ID NO: 85261 - protein, 9 aa, synthetic construct
  source 1..9: note = Seed: VVVGAGDVG (KRAS G13D)
FVVIAGDVE

SEQ ID NO: 85262 - protein, 9 aa, synthetic construct
  source 1..9: note = Seed: VVVGAGDVG (KRAS G13D)
FVVIAGDVF

SEQ ID NO: 85263 - protein, 9 aa, synthetic construct
  source 1..9: note = Seed: VVVGAGDVG (KRAS G13D)
FVVIAGDVG

SEQ ID NO: 85264 - protein, 9 aa, synthetic construct
  source 1..9: note = Seed: VVVGAGDVG (KRAS G13D)
FVVIAGDVH

SEQ ID NO: 85265 - protein, 9 aa, synthetic construct
  source 1..9: note = Seed: VVVGAGDVG (KRAS G13D)
FVVIAGDVI

SEQ ID NO: 85266 - protein, 9 aa, synthetic construct
  source 1..9: note = Seed: VVVGAGDVG (KRAS G13D)
FVVIAGDVK

SEQ ID NO: 85267 - protein, 9 aa, synthetic construct
  source 1..9: note = Seed: VVVGAGDVG (KRAS G13D)
FVVIAGDVL

SEQ ID NO: 85268 - protein, 9 aa, synthetic construct
  source 1..9: note = Seed: VVVGAGDVG (KRAS G13D)
FVVIAGDVM

SEQ ID NO: 85269 - protein, 9 aa, synthetic construct
  source 1..9: note = Seed: VVVGAGDVG (KRAS G13D)
FVVIAGDVN

SEQ ID NO: 85270 - protein, 9 aa, synthetic construct
  source 1..9: note = Seed: VVVGAGDVG (KRAS G13D)
FVVIAGDVP

SEQ ID NO: 85271 - protein, 9 aa, synthetic construct
  source 1..9: note = Seed: VVVGAGDVG (KRAS G13D)
FVVIAGDVQ

SEQ ID NO: 85272 - protein, 9 aa, synthetic construct
  source 1..9: note = Seed: VVVGAGDVG (KRAS G13D)
FVVIAGDVR

SEQ ID NO: 85273 - protein, 9 aa, synthetic construct
  source 1..9: note = Seed: VVVGAGDVG (KRAS G13D)
FVVIAGDVS

SEQ ID NO: 85274 - protein, 9 aa, synthetic construct
  source 1..9: note = Seed: VVVGAGDVG (KRAS G13D)
FVVIAGDVT

SEQ ID NO: 85275 - protein, 9 aa, synthetic construct
  source 1..9: note = Seed: VVVGAGDVG (KRAS G13D)
FVVIAGDVV

SEQ ID NO: 85276 - protein, 9 aa, synthetic construct
  source 1..9: note = Seed: VVVGAGDVG (KRAS G13D)
FVVIAGDVY

SEQ ID NO: 85277 - protein, 9 aa, synthetic construct
  source 1..9: note = Seed: VVVGAGDVG (KRAS G13D)
FVVIAHDVA

SEQ ID NO: 85278 - protein, 9 aa, synthetic construct
  source 1..9: note = Seed: VVVGAGDVG (KRAS G13D)
FVVIAHDVD

SEQ ID NO: 85279 - protein, 9 aa, synthetic construct
  source 1..9: note = Seed: VVVGAGDVG (KRAS G13D)
FVVIAHDVE

SEQ ID NO: 85280 - protein, 9 aa, synthetic construct
  source 1..9: note = Seed: VVVGAGDVG (KRAS G13D)
FVVIAHDVG

SEQ ID NO: 85281 - protein, 9 aa, synthetic construct
  source 1..9: note = Seed: VVVGAGDVG (KRAS G13D)
FVVIAHDVH

SEQ ID NO: 85282 - protein, 9 aa, synthetic construct
  source 1..9: note = Seed: VVVGAGDVG (KRAS G13D)
FVVIAHDVI

SEQ ID NO: 85283 - protein, 9 aa, synthetic construct
  source 1..9: note = Seed: VVVGAGDVG (KRAS G13D)
FVVIAHDVL

SEQ ID NO: 85284 - protein, 9 aa, synthetic construct
  source 1..9: note = Seed: VVVGAGDVG (KRAS G13D)
FVVIAHDVM

SEQ ID NO: 85285 - protein, 9 aa, synthetic construct
  source 1..9: note = Seed: VVVGAGDVG (KRAS G13D)
FVVIAHDVN

SEQ ID NO: 85286 - protein, 9 aa, synthetic construct
  source 1..9: note = Seed: VVVGAGDVG (KRAS G13D)
FVVIAHDVP

SEQ ID NO: 85287 - protein, 9 aa, synthetic construct
  source 1..9: note = Seed: VVVGAGDVG (KRAS G13D)
FVVIAHDVQ

SEQ ID NO: 85288 - protein, 9 aa, synthetic construct
  source 1..9: note = Seed: VVVGAGDVG (KRAS G13D)
FVVIAHDVS

SEQ ID NO: 85289 - protein, 9 aa, synthetic construct
  source 1..9: note = Seed: VVVGAGDVG (KRAS G13D)
FVVIAHDVT

SEQ ID NO: 85290 - protein, 9 aa, synthetic construct
  source 1..9: note = Seed: VVVGAGDVG (KRAS G13D)
FVVIAHDVV

SEQ ID NO: 85291 - protein, 9 aa, synthetic construct
  source 1..9: note = Seed: VVVGAGDVG (KRAS G13D)
FVVIAHDVY

SEQ ID NO: 85292 - protein, 9 aa, synthetic construct
  source 1..9: note = Seed: VVVGAGDVG (KRAS G13D)
FVVIAIDVA

SEQ ID NO: 85293 - protein, 9 aa, synthetic construct
  source 1..9: note = Seed: VVVGAGDVG (KRAS G13D)
FVVIAIDVD

SEQ ID NO: 85294 - protein, 9 aa, synthetic construct
  source 1..9: note = Seed: VVVGAGDVG (KRAS G13D)
FVVIAIDVE

SEQ ID NO: 85295 - protein, 9 aa, synthetic construct
  source 1..9: note = Seed: VVVGAGDVG (KRAS G13D)
FVVIAIDVG

SEQ ID NO: 85296 - protein, 9 aa, synthetic construct
  source 1..9: note = Seed: VVVGAGDVG (KRAS G13D)
FVVIAIDVH

SEQ ID NO: 85297 - protein, 9 aa, synthetic construct
  source 1..9: note = Seed: VVVGAGDVG (KRAS G13D)
FVVIAIDVI

SEQ ID NO: 85298 - protein, 9 aa, synthetic construct
  source 1..9: note = Seed: VVVGAGDVG (KRAS G13D)
FVVIAIDVK

SEQ ID NO: 85299 - protein, 9 aa, synthetic construct
  source 1..9: note = Seed: VVVGAGDVG (KRAS G13D)
FVVIAIDVL

SEQ ID NO: 85300 - protein, 9 aa, synthetic construct
  source 1..9: note = Seed: VVVGAGDVG (KRAS G13D)
FVVIAIDVM

SEQ ID NO: 85301 - protein, 9 aa, synthetic construct
  source 1..9: note = Seed: VVVGAGDVG (KRAS G13D)
FVVIAIDVN

SEQ ID NO: 85302 - protein, 9 aa, synthetic construct
  source 1..9: note = Seed: VVVGAGDVG (KRAS G13D)
FVVIAIDVQ

SEQ ID NO: 85303 - protein, 9 aa, synthetic construct
  source 1..9: note = Seed: VVVGAGDVG (KRAS G13D)
FVVIAIDVR

SEQ ID NO: 85304 - protein, 9 aa, synthetic construct
  source 1..9: note = Seed: VVVGAGDVG (KRAS G13D)
FVVIAIDVS

SEQ ID NO: 85305 - protein, 9 aa, synthetic construct
  source 1..9: note = Seed: VVVGAGDVG (KRAS G13D)
FVVIAIDVT

SEQ ID NO: 85306 - protein, 9 aa, synthetic construct
  source 1..9: note = Seed: VVVGAGDVG (KRAS G13D)
FVVIAIDVV

SEQ ID NO: 85307 - protein, 9 aa, synthetic construct
  source 1..9: note = Seed: VVVGAGDVG (KRAS G13D)
FVVIAIDVY

SEQ ID NO: 85308 - protein, 9 aa, synthetic construct
  source 1..9: note = Seed: VVVGAGDVG (KRAS G13D)
FVVIAKDVA

SEQ ID NO: 85309 - protein, 9 aa, synthetic construct
  source 1..9: note = Seed: VVVGAGDVG (KRAS G13D)
FVVIAKDVN

SEQ ID NO: 85310 - protein, 9 aa, synthetic construct
  source 1..9: note = Seed: VVVGAGDVG (KRAS G13D)
FVVIAKDVS

SEQ ID NO: 85311 - protein, 9 aa, synthetic construct
  source 1..9: note = Seed: VVVGAGDVG (KRAS G13D)
FVVIALDVG

SEQ ID NO: 85312 - protein, 9 aa, synthetic construct
  source 1..9: note = Seed: VVVGAGDVG (KRAS G13D)
FVVIALDVS

SEQ ID NO: 85313 - protein, 9 aa, synthetic construct
  source 1..9: note = Seed: VVVGAGDVG (KRAS G13D)
FVVIAMDVC

SEQ ID NO: 85314 - protein, 9 aa, synthetic construct
  source 1..9: note = Seed: VVVGAGDVG (KRAS G13D)
FVVIAMDVG

SEQ ID NO: 85315 - protein, 9 aa, synthetic construct
  source 1..9: note = Seed: VVVGAGDVG (KRAS G13D)
FVVIANDVA

SEQ ID NO: 85316 - protein, 9 aa, synthetic construct
  source 1..9: note = Seed: VVVGAGDVG (KRAS G13D)
FVVIANDVC

SEQ ID NO: 85317 - protein, 9 aa, synthetic construct
  source 1..9: note = Seed: VVVGAGDVG (KRAS G13D)
FVVIANDVD

SEQ ID NO: 85318 - protein, 9 aa, synthetic construct
  source 1..9: note = Seed: VVVGAGDVG (KRAS G13D)
FVVIANDVE

SEQ ID NO: 85319 - protein, 9 aa, synthetic construct
  source 1..9: note = Seed: VVVGAGDVG (KRAS G13D)
FVVIANDVF

SEQ ID NO: 85320 - protein, 9 aa, synthetic construct
  source 1..9: note = Seed: VVVGAGDVG (KRAS G13D)
FVVIANDVG

SEQ ID NO: 85321 - protein, 9 aa, synthetic construct
  source 1..9: note = Seed: VVVGAGDVG (KRAS G13D)
FVVIANDVH

SEQ ID NO: 85322 - protein, 9 aa, synthetic construct
  source 1..9: note = Seed: VVVGAGDVG (KRAS G13D)
FVVIANDVI

SEQ ID NO: 85323 - protein, 9 aa, synthetic construct
  source 1..9: note = Seed: VVVGAGDVG (KRAS G13D)
FVVIANDVK

SEQ ID NO: 85324 - protein, 9 aa, synthetic construct
  source 1..9: note = Seed: VVVGAGDVG (KRAS G13D)
FVVIANDVL

SEQ ID NO: 85325 - protein, 9 aa, synthetic construct
  source 1..9: note = Seed: VVVGAGDVG (KRAS G13D)
FVVIANDVM

SEQ ID NO: 85326 - protein, 9 aa, synthetic construct
  source 1..9: note = Seed: VVVGAGDVG (KRAS G13D)
FVVIANDVN

SEQ ID NO: 85327 - protein, 9 aa, synthetic construct
  source 1..9: note = Seed: VVVGAGDVG (KRAS G13D)
FVVIANDVP

SEQ ID NO: 85328 - protein, 9 aa, synthetic construct
  source 1..9: note = Seed: VVVGAGDVG (KRAS G13D)
FVVIANDVQ

SEQ ID NO: 85329 - protein, 9 aa, synthetic construct
  source 1..9: note = Seed: VVVGAGDVG (KRAS G13D)
FVVIANDVR

SEQ ID NO: 85330 - protein, 9 aa, synthetic construct
  source 1..9: note = Seed: VVVGAGDVG (KRAS G13D)
FVVIANDVS

SEQ ID NO: 85331 - protein, 9 aa, synthetic construct
  source 1..9: note = Seed: VVVGAGDVG (KRAS G13D)
FVVIANDVT

SEQ ID NO: 85332 - protein, 9 aa, synthetic construct
  source 1..9: note = Seed: VVVGAGDVG (KRAS G13D)
FVVIANDVV

SEQ ID NO: 85333 - protein, 9 aa, synthetic construct
  source 1..9: note = Seed: VVVGAGDVG (KRAS G13D)
FVVIANDVW

SEQ ID NO: 85334 - protein, 9 aa, synthetic construct
  source 1..9: note = Seed: VVVGAGDVG (KRAS G13D)
FVVIANDVY

SEQ ID NO: 85335 - protein, 9 aa, synthetic construct
  source 1..9: note = Seed: VVVGAGDVG (KRAS G13D)
FVVIAPDVA

SEQ ID NO: 85336 - protein, 9 aa, synthetic construct
  source 1..9: note = Seed: VVVGAGDVG (KRAS G13D)
FVVIAPDVC

SEQ ID NO: 85337 - protein, 9 aa, synthetic construct
  source 1..9: note = Seed: VVVGAGDVG (KRAS G13D)
FVVIAPDVD

SEQ ID NO: 85338 - protein, 9 aa, synthetic construct
  source 1..9: note = Seed: VVVGAGDVG (KRAS G13D)
FVVIAPDVE

SEQ ID NO: 85339 - protein, 9 aa, synthetic construct
  source 1..9: note = Seed: VVVGAGDVG (KRAS G13D)
FVVIAPDVF

SEQ ID NO: 85340 - protein, 9 aa, synthetic construct
  source 1..9: note = Seed: VVVGAGDVG (KRAS G13D)
FVVIAPDVG

SEQ ID NO: 85341 - protein, 9 aa, synthetic construct
  source 1..9: note = Seed: VVVGAGDVG (KRAS G13D)
FVVIAPDVH

SEQ ID NO: 85342 - protein, 9 aa, synthetic construct
  source 1..9: note = Seed: VVVGAGDVG (KRAS G13D)
FVVIAPDVI

SEQ ID NO: 85343 - protein, 9 aa, synthetic construct
  source 1..9: note = Seed: VVVGAGDVG (KRAS G13D)
FVVIAPDVK

SEQ ID NO: 85344 - protein, 9 aa, synthetic construct
  source 1..9: note = Seed: VVVGAGDVG (KRAS G13D)
FVVIAPDVL

SEQ ID NO: 85345 - protein, 9 aa, synthetic construct
  source 1..9: note = Seed: VVVGAGDVG (KRAS G13D)
FVVIAPDVM

SEQ ID NO: 85346 - protein, 9 aa, synthetic construct
  source 1..9: note = Seed: VVVGAGDVG (KRAS G13D)
FVVIAPDVN

SEQ ID NO: 85347 - protein, 9 aa, synthetic construct
  source 1..9: note = Seed: VVVGAGDVG (KRAS G13D)
FVVIAPDVP

SEQ ID NO: 85348 - protein, 9 aa, synthetic construct
  source 1..9: note = Seed: VVVGAGDVG (KRAS G13D)
FVVIAPDVQ

SEQ ID NO: 85349 - protein, 9 aa, synthetic construct
  source 1..9: note = Seed: VVVGAGDVG (KRAS G13D)
FVVIAPDVR

SEQ ID NO: 85350 - protein, 9 aa, synthetic construct
  source 1..9: note = Seed: VVVGAGDVG (KRAS G13D)
FVVIAPDVS

SEQ ID NO: 85351 - protein, 9 aa, synthetic construct
  source 1..9: note = Seed: VVVGAGDVG (KRAS G13D)
FVVIAPDVT

SEQ ID NO: 85352 - protein, 9 aa, synthetic construct
  source 1..9: note = Seed: VVVGAGDVG (KRAS G13D)
FVVIAPDVV

SEQ ID NO: 85353 - protein, 9 aa, synthetic construct
  source 1..9: note = Seed: VVVGAGDVG (KRAS G13D)
FVVIAPDVW

SEQ ID NO: 85354 - protein, 9 aa, synthetic construct
  source 1..9: note = Seed: VVVGAGDVG (KRAS G13D)
FVVIAPDVY

SEQ ID NO: 85355 - protein, 9 aa, synthetic construct
  source 1..9: note = Seed: VVVGAGDVG (KRAS G13D)
FVVIAQDVA

SEQ ID NO: 85356 - protein, 9 aa, synthetic construct
  source 1..9: note = Seed: VVVGAGDVG (KRAS G13D)
FVVIAQDVG

SEQ ID NO: 85357 - protein, 9 aa, synthetic construct
  source 1..9: note = Seed: VVVGAGDVG (KRAS G13D)
FVVIAQDVH

SEQ ID NO: 85358 - protein, 9 aa, synthetic construct
  source 1..9: note = Seed: VVVGAGDVG (KRAS G13D)
FVVIAQDVM

SEQ ID NO: 85359 - protein, 9 aa, synthetic construct
  source 1..9: note = Seed: VVVGAGDVG (KRAS G13D)
FVVIAQDVN

SEQ ID NO: 85360 - protein, 9 aa, synthetic construct
  source 1..9: note = Seed: VVVGAGDVG (KRAS G13D)
FVVIAQDVQ

SEQ ID NO: 85361 - protein, 9 aa, synthetic construct
  source 1..9: note = Seed: VVVGAGDVG (KRAS G13D)
FVVIAQDVS

SEQ ID NO: 85362 - protein, 9 aa, synthetic construct
  source 1..9: note = Seed: VVVGAGDVG (KRAS G13D)
FVVIAQDVT

SEQ ID NO: 85363 - protein, 9 aa, synthetic construct
  source 1..9: note = Seed: VVVGAGDVG (KRAS G13D)
FVVIAQDVV

SEQ ID NO: 85364 - protein, 9 aa, synthetic construct
  source 1..9: note = Seed: VVVGAGDVG (KRAS G13D)
FVVIARDVA

SEQ ID NO: 85365 - protein, 9 aa, synthetic construct
  source 1..9: note = Seed: VVVGAGDVG (KRAS G13D)
FVVIARDVH

SEQ ID NO: 85366 - protein, 9 aa, synthetic construct
  source 1..9: note = Seed: VVVGAGDVG (KRAS G13D)
FVVIARDVS

SEQ ID NO: 85367 - protein, 9 aa, synthetic construct
  source 1..9: note = Seed: VVVGAGDVG (KRAS G13D)
FVVIASDVA

SEQ ID NO: 85368 - protein, 9 aa, synthetic construct
  source 1..9: note = Seed: VVVGAGDVG (KRAS G13D)
FVVIASDVC

SEQ ID NO: 85369 - protein, 9 aa, synthetic construct
  source 1..9: note = Seed: VVVGAGDVG (KRAS G13D)
FVVIASDVD

SEQ ID NO: 85370 - protein, 9 aa, synthetic construct
  source 1..9: note = Seed: VVVGAGDVG (KRAS G13D)
FVVIASDVE

SEQ ID NO: 85371 - protein, 9 aa, synthetic construct
  source 1..9: note = Seed: VVVGAGDVG (KRAS G13D)
FVVIASDVF

SEQ ID NO: 85372 - protein, 9 aa, synthetic construct
  source 1..9: note = Seed: VVVGAGDVG (KRAS G13D)
FVVIASDVG

SEQ ID NO: 85373 - protein, 9 aa, synthetic construct
  source 1..9: note = Seed: VVVGAGDVG (KRAS G13D)
FVVIASDVH

SEQ ID NO: 85374 - protein, 9 aa, synthetic construct
  source 1..9: note = Seed: VVVGAGDVG (KRAS G13D)
FVVIASDVI

SEQ ID NO: 85375 - protein, 9 aa, synthetic construct
  source 1..9: note = Seed: VVVGAGDVG (KRAS G13D)
FVVIASDVK

SEQ ID NO: 85376 - protein, 9 aa, synthetic construct
  source 1..9: note = Seed: VVVGAGDVG (KRAS G13D)
FVVIASDVL

SEQ ID NO: 85377 - protein, 9 aa, synthetic construct
  source 1..9: note = Seed: VVVGAGDVG (KRAS G13D)
FVVIASDVM

SEQ ID NO: 85378 - protein, 9 aa, synthetic construct
  source 1..9: note = Seed: VVVGAGDVG (KRAS G13D)
FVVIASDVN

SEQ ID NO: 85379 - protein, 9 aa, synthetic construct
  source 1..9: note = Seed: VVVGAGDVG (KRAS G13D)
FVVIASDVP

SEQ ID NO: 85380 - protein, 9 aa, synthetic construct
  source 1..9: note = Seed: VVVGAGDVG (KRAS G13D)
FVVIASDVQ

SEQ ID NO: 85381 - protein, 9 aa, synthetic construct
  source 1..9: note = Seed: VVVGAGDVG (KRAS G13D)
FVVIASDVR

SEQ ID NO: 85382 - protein, 9 aa, synthetic construct
  source 1..9: note = Seed: VVVGAGDVG (KRAS G13D)
FVVIASDVS

SEQ ID NO: 85383 - protein, 9 aa, synthetic construct
  source 1..9: note = Seed: VVVGAGDVG (KRAS G13D)
FVVIASDVT

SEQ ID NO: 85384 - protein, 9 aa, synthetic construct
  source 1..9: note = Seed: VVVGAGDVG (KRAS G13D)
FVVIASDVV

SEQ ID NO: 85385 - protein, 9 aa, synthetic construct
  source 1..9: note = Seed: VVVGAGDVG (KRAS G13D)
FVVIASDVW

SEQ ID NO: 85386 - protein, 9 aa, synthetic construct
  source 1..9: note = Seed: VVVGAGDVG (KRAS G13D)
FVVIASDVY

SEQ ID NO: 85387 - protein, 9 aa, synthetic construct
  source 1..9: note = Seed: VVVGAGDVG (KRAS G13D)
FVVIATDVA

SEQ ID NO: 85388 - protein, 9 aa, synthetic construct
  source 1..9: note = Seed: VVVGAGDVG (KRAS G13D)
FVVIATDVC

SEQ ID NO: 85389 - protein, 9 aa, synthetic construct
  source 1..9: note = Seed: VVVGAGDVG (KRAS G13D)
FVVIATDVD

SEQ ID NO: 85390 - protein, 9 aa, synthetic construct
  source 1..9: note = Seed: VVVGAGDVG (KRAS G13D)
FVVIATDVE

SEQ ID NO: 85391 - protein, 9 aa, synthetic construct
  source 1..9: note = Seed: VVVGAGDVG (KRAS G13D)
FVVIATDVF

SEQ ID NO: 85392 - protein, 9 aa, synthetic construct
  source 1..9: note = Seed: VVVGAGDVG (KRAS G13D)
FVVIATDVG

SEQ ID NO: 85393 - protein, 9 aa, synthetic construct
  source 1..9: note = Seed: VVVGAGDVG (KRAS G13D)
FVVIATDVH

SEQ ID NO: 85394 - protein, 9 aa, synthetic construct
  source 1..9: note = Seed: VVVGAGDVG (KRAS G13D)
FVVIATDVI

SEQ ID NO: 85395 - protein, 9 aa, synthetic construct
  source 1..9: note = Seed: VVVGAGDVG (KRAS G13D)
FVVIATDVK

SEQ ID NO: 85396 - protein, 9 aa, synthetic construct
  source 1..9: note = Seed: VVVGAGDVG (KRAS G13D)
FVVIATDVL

SEQ ID NO: 85397 - protein, 9 aa, synthetic construct
  source 1..9: note = Seed: VVVGAGDVG (KRAS G13D)
FVVIATDVM

SEQ ID NO: 85398 - protein, 9 aa, synthetic construct
  source 1..9: note = Seed: VVVGAGDVG (KRAS G13D)
FVVIATDVN

SEQ ID NO: 85399 - protein, 9 aa, synthetic construct
  source 1..9: note = Seed: VVVGAGDVG (KRAS G13D)
FVVIATDVP

SEQ ID NO: 85400 - protein, 9 aa, synthetic construct
  source 1..9: note = Seed: VVVGAGDVG (KRAS G13D)
FVVIATDVQ

SEQ ID NO: 85401 - protein, 9 aa, synthetic construct
  source 1..9: note = Seed: VVVGAGDVG (KRAS G13D)
FVVIATDVR

SEQ ID NO: 85402 - protein, 9 aa, synthetic construct
  source 1..9: note = Seed: VVVGAGDVG (KRAS G13D)
FVVIATDVS

SEQ ID NO: 85403 - protein, 9 aa, synthetic construct
  source 1..9: note = Seed: VVVGAGDVG (KRAS G13D)
FVVIATDVT

SEQ ID NO: 85404 - protein, 9 aa, synthetic construct
  source 1..9: note = Seed: VVVGAGDVG (KRAS G13D)
FVVIATDVV

SEQ ID NO: 85405 - protein, 9 aa, synthetic construct
  source 1..9: note = Seed: VVVGAGDVG (KRAS G13D)
FVVIATDVY

SEQ ID NO: 85406 - protein, 9 aa, synthetic construct
  source 1..9: note = Seed: VVVGAGDVG (KRAS G13D)
FVVIAVDVA

SEQ ID NO: 85407 - protein, 9 aa, synthetic construct
  source 1..9: note = Seed: VVVGAGDVG (KRAS G13D)
FVVIAVDVD

SEQ ID NO: 85408 - protein, 9 aa, synthetic construct
  source 1..9: note = Seed: VVVGAGDVG (KRAS G13D)
FVVIAVDVE

SEQ ID NO: 85409 - protein, 9 aa, synthetic construct
  source 1..9: note = Seed: VVVGAGDVG (KRAS G13D)
FVVIAVDVG

SEQ ID NO: 85410 - protein, 9 aa, synthetic construct
  source 1..9: note = Seed: VVVGAGDVG (KRAS G13D)
FVVIAVDVH

SEQ ID NO: 85411 - protein, 9 aa, synthetic construct
  source 1..9: note = Seed: VVVGAGDVG (KRAS G13D)
FVVIAVDVI

SEQ ID NO: 85412 - protein, 9 aa, synthetic construct
  source 1..9: note = Seed: VVVGAGDVG (KRAS G13D)
FVVIAVDVK

SEQ ID NO: 85413 - protein, 9 aa, synthetic construct
  source 1..9: note = Seed: VVVGAGDVG (KRAS G13D)
FVVIAVDVL

SEQ ID NO: 85414 - protein, 9 aa, synthetic construct
  source 1..9: note = Seed: VVVGAGDVG (KRAS G13D)
FVVIAVDVM

SEQ ID NO: 85415 - protein, 9 aa, synthetic construct
  source 1..9: note = Seed: VVVGAGDVG (KRAS G13D)
FVVIAVDVN

SEQ ID NO: 85416 - protein, 9 aa, synthetic construct
  source 1..9: note = Seed: VVVGAGDVG (KRAS G13D)
FVVIAVDVP

SEQ ID NO: 85417 - protein, 9 aa, synthetic construct
  source 1..9: note = Seed: VVVGAGDVG (KRAS G13D)
FVVIAVDVQ

SEQ ID NO: 85418 - protein, 9 aa, synthetic construct
  source 1..9: note = Seed: VVVGAGDVG (KRAS G13D)
FVVIAVDVR

SEQ ID NO: 85419 - protein, 9 aa, synthetic construct
  source 1..9: note = Seed: VVVGAGDVG (KRAS G13D)
FVVIAVDVS

SEQ ID NO: 85420 - protein, 9 aa, synthetic construct
  source 1..9: note = Seed: VVVGAGDVG (KRAS G13D)
FVVIAVDVT

SEQ ID NO: 85421 - protein, 9 aa, synthetic construct
  source 1..9: note = Seed: VVVGAGDVG (KRAS G13D)
FVVIAVDVV

SEQ ID NO: 85422 - protein, 9 aa, synthetic construct
  source 1..9: note = Seed: VVVGAGDVG (KRAS G13D)
FVVIAVDVY

SEQ ID NO: 85423 - protein, 9 aa, synthetic construct
  source 1..9: note = Seed: VVVGAGDVG (KRAS G13D)
FVVIAYDVA

SEQ ID NO: 85424 - protein, 9 aa, synthetic construct
  source 1..9: note = Seed: VVVGAGDVG (KRAS G13D)
FVVIAYDVN

SEQ ID NO: 85425 - protein, 9 aa, synthetic construct
  source 1..9: note = Seed: VVVGAGDVG (KRAS G13D)
FVVKAADVA

SEQ ID NO: 85426 - protein, 9 aa, synthetic construct
  source 1..9: note = Seed: VVVGAGDVG (KRAS G13D)
FVVKAADVC

SEQ ID NO: 85427 - protein, 9 aa, synthetic construct
  source 1..9: note = Seed: VVVGAGDVG (KRAS G13D)
FVVKAADVD

SEQ ID NO: 85428 - protein, 9 aa, synthetic construct
  source 1..9: note = Seed: VVVGAGDVG (KRAS G13D)
FVVKAADVE

SEQ ID NO: 85429 - protein, 9 aa, synthetic construct
  source 1..9: note = Seed: VVVGAGDVG (KRAS G13D)
FVVKAADVG

SEQ ID NO: 85430 - protein, 9 aa, synthetic construct
  source 1..9: note = Seed: VVVGAGDVG (KRAS G13D)
FVVKAADVH

SEQ ID NO: 85431 - protein, 9 aa, synthetic construct
  source 1..9: note = Seed: VVVGAGDVG (KRAS G13D)
FVVKAADVI

SEQ ID NO: 85432 - protein, 9 aa, synthetic construct
  source 1..9: note = Seed: VVVGAGDVG (KRAS G13D)
FVVKAADVL

SEQ ID NO: 85433 - protein, 9 aa, synthetic construct
  source 1..9: note = Seed: VVVGAGDVG (KRAS G13D)
FVVKAADVM

SEQ ID NO: 85434 - protein, 9 aa, synthetic construct
  source 1..9: note = Seed: VVVGAGDVG (KRAS G13D)
FVVKAADVN

SEQ ID NO: 85435 - protein, 9 aa, synthetic construct
  source 1..9: note = Seed: VVVGAGDVG (KRAS G13D)
FVVKAADVQ

SEQ ID NO: 85436 - protein, 9 aa, synthetic construct
  source 1..9: note = Seed: VVVGAGDVG (KRAS G13D)
FVVKAADVS

SEQ ID NO: 85437 - protein, 9 aa, synthetic construct
  source 1..9: note = Seed: VVVGAGDVG (KRAS G13D)
FVVKAADVT

SEQ ID NO: 85438 - protein, 9 aa, synthetic construct
  source 1..9: note = Seed: VVVGAGDVG (KRAS G13D)
FVVKAADVV

SEQ ID NO: 85439 - protein, 9 aa, synthetic construct
  source 1..9: note = Seed: VVVGAGDVG (KRAS G13D)
FVVKACDVA

SEQ ID NO: 85440 - protein, 9 aa, synthetic construct
  source 1..9: note = Seed: VVVGAGDVG (KRAS G13D)
FVVKAGDVA

SEQ ID NO: 85441 - protein, 9 aa, synthetic construct
  source 1..9: note = Seed: VVVGAGDVG (KRAS G13D)
FVVKAGDVI

SEQ ID NO: 85442 - protein, 9 aa, synthetic construct
  source 1..9: note = Seed: VVVGAGDVG (KRAS G13D)
FVVKAGDVL

SEQ ID NO: 85443 - protein, 9 aa, synthetic construct
  source 1..9: note = Seed: VVVGAGDVG (KRAS G13D)
FVVKAGDVM

SEQ ID NO: 85444 - protein, 9 aa, synthetic construct
  source 1..9: note = Seed: VVVGAGDVG (KRAS G13D)
FVVKAGDVN

SEQ ID NO: 85445 - protein, 9 aa, synthetic construct
  source 1..9: note = Seed: VVVGAGDVG (KRAS G13D)
FVVKAGDVS

SEQ ID NO: 85446 - protein, 9 aa, synthetic construct
  source 1..9: note = Seed: VVVGAGDVG (KRAS G13D)
FVVKAGDVV

SEQ ID NO: 85447 - protein, 9 aa, synthetic construct
  source 1..9: note = Seed: VVVGAGDVG (KRAS G13D)
FVVKAIDVC

SEQ ID NO: 85448 - protein, 9 aa, synthetic construct
  source 1..9: note = Seed: VVVGAGDVG (KRAS G13D)
FVVKAIDVG

SEQ ID NO: 85449 - protein, 9 aa, synthetic construct
  source 1..9: note = Seed: VVVGAGDVG (KRAS G13D)
FVVKAIDVS

SEQ ID NO: 85450 - protein, 9 aa, synthetic construct
  source 1..9: note = Seed: VVVGAGDVG (KRAS G13D)
FVVKANDVA

SEQ ID NO: 85451 - protein, 9 aa, synthetic construct
  source 1..9: note = Seed: VVVGAGDVG (KRAS G13D)
FVVKANDVC

SEQ ID NO: 85452 - protein, 9 aa, synthetic construct
  source 1..9: note = Seed: VVVGAGDVG (KRAS G13D)
FVVKANDVG

SEQ ID NO: 85453 - protein, 9 aa, synthetic construct
  source 1..9: note = Seed: VVVGAGDVG (KRAS G13D)
FVVKANDVH

SEQ ID NO: 85454 - protein, 9 aa, synthetic construct
  source 1..9: note = Seed: VVVGAGDVG (KRAS G13D)
FVVKANDVI

SEQ ID NO: 85455 - protein, 9 aa, synthetic construct
  source 1..9: note = Seed: VVVGAGDVG (KRAS G13D)
FVVKANDVL

SEQ ID NO: 85456 - protein, 9 aa, synthetic construct
  source 1..9: note = Seed: VVVGAGDVG (KRAS G13D)
FVVKANDVM

SEQ ID NO: 85457 - protein, 9 aa, synthetic construct
  source 1..9: note = Seed: VVVGAGDVG (KRAS G13D)
FVVKANDVN

SEQ ID NO: 85458 - protein, 9 aa, synthetic construct
  source 1..9: note = Seed: VVVGAGDVG (KRAS G13D)
FVVKANDVQ

SEQ ID NO: 85459 - protein, 9 aa, synthetic construct
  source 1..9: note = Seed: VVVGAGDVG (KRAS G13D)
FVVKANDVS

SEQ ID NO: 85460 - protein, 9 aa, synthetic construct
  source 1..9: note = Seed: VVVGAGDVG (KRAS G13D)
FVVKANDVT

SEQ ID NO: 85461 - protein, 9 aa, synthetic construct
  source 1..9: note = Seed: VVVGAGDVG (KRAS G13D)
FVVKANDVV

SEQ ID NO: 85462 - protein, 9 aa, synthetic construct
  source 1..9: note = Seed: VVVGAGDVG (KRAS G13D)
FVVKAPDVA

SEQ ID NO: 85463 - protein, 9 aa, synthetic construct
  source 1..9: note = Seed: VVVGAGDVG (KRAS G13D)
FVVKAPDVH

SEQ ID NO: 85464 - protein, 9 aa, synthetic construct
  source 1..9: note = Seed: VVVGAGDVG (KRAS G13D)
FVVKAPDVI

SEQ ID NO: 85465 - protein, 9 aa, synthetic construct
  source 1..9: note = Seed: VVVGAGDVG (KRAS G13D)
FVVKAPDVL

SEQ ID NO: 85466 - protein, 9 aa, synthetic construct
  source 1..9: note = Seed: VVVGAGDVG (KRAS G13D)
FVVKAPDVM

SEQ ID NO: 85467 - protein, 9 aa, synthetic construct
  source 1..9: note = Seed: VVVGAGDVG (KRAS G13D)
FVVKAPDVN

SEQ ID NO: 85468 - protein, 9 aa, synthetic construct
  source 1..9: note = Seed: VVVGAGDVG (KRAS G13D)
FVVKAPDVQ

SEQ ID NO: 85469 - protein, 9 aa, synthetic construct
  source 1..9: note = Seed: VVVGAGDVG (KRAS G13D)
FVVKAPDVS

SEQ ID NO: 85470 - protein, 9 aa, synthetic construct
  source 1..9: note = Seed: VVVGAGDVG (KRAS G13D)
FVVKAPDVT

SEQ ID NO: 85471 - protein, 9 aa, synthetic construct
  source 1..9: note = Seed: VVVGAGDVG (KRAS G13D)
FVVKAPDVV

SEQ ID NO: 85472 - protein, 9 aa, synthetic construct
  source 1..9: note = Seed: VVVGAGDVG (KRAS G13D)
FVVKASDVA

SEQ ID NO: 85473 - protein, 9 aa, synthetic construct
  source 1..9: note = Seed: VVVGAGDVG (KRAS G13D)
FVVKASDVC

SEQ ID NO: 85474 - protein, 9 aa, synthetic construct
  source 1..9: note = Seed: VVVGAGDVG (KRAS G13D)
FVVKASDVD

SEQ ID NO: 85475 - protein, 9 aa, synthetic construct
  source 1..9: note = Seed: VVVGAGDVG (KRAS G13D)
FVVKASDVE

SEQ ID NO: 85476 - protein, 9 aa, synthetic construct
  source 1..9: note = Seed: VVVGAGDVG (KRAS G13D)
FVVKASDVG

SEQ ID NO: 85477 - protein, 9 aa, synthetic construct
  source 1..9: note = Seed: VVVGAGDVG (KRAS G13D)
FVVKASDVH

SEQ ID NO: 85478 - protein, 9 aa, synthetic construct
  source 1..9: note = Seed: VVVGAGDVG (KRAS G13D)
FVVKASDVI

SEQ ID NO: 85479 - protein, 9 aa, synthetic construct
  source 1..9: note = Seed: VVVGAGDVG (KRAS G13D)
FVVKASDVL

SEQ ID NO: 85480 - protein, 9 aa, synthetic construct
  source 1..9: note = Seed: VVVGAGDVG (KRAS G13D)
FVVKASDVM

SEQ ID NO: 85481 - protein, 9 aa, synthetic construct
  source 1..9: note = Seed: VVVGAGDVG (KRAS G13D)
FVVKASDVN

SEQ ID NO: 85482 - protein, 9 aa, synthetic construct
  source 1..9: note = Seed: VVVGAGDVG (KRAS G13D)
FVVKASDVQ

SEQ ID NO: 85483 - protein, 9 aa, synthetic construct
  source 1..9: note = Seed: VVVGAGDVG (KRAS G13D)
FVVKASDVS

SEQ ID NO: 85484 - protein, 9 aa, synthetic construct
  source 1..9: note = Seed: VVVGAGDVG (KRAS G13D)
FVVKASDVT

SEQ ID NO: 85485 - protein, 9 aa, synthetic construct
  source 1..9: note = Seed: VVVGAGDVG (KRAS G13D)
FVVKASDVV

SEQ ID NO: 85486 - protein, 9 aa, synthetic construct
  source 1..9: note = Seed: VVVGAGDVG (KRAS G13D)
FVVKATDVA

SEQ ID NO: 85487 - protein, 9 aa, synthetic construct
  source 1..9: note = Seed: VVVGAGDVG (KRAS G13D)
FVVKATDVE

SEQ ID NO: 85488 - protein, 9 aa, synthetic construct
  source 1..9: note = Seed: VVVGAGDVG (KRAS G13D)
FVVKATDVF

SEQ ID NO: 85489 - protein, 9 aa, synthetic construct
  source 1..9: note = Seed: VVVGAGDVG (KRAS G13D)
FVVKATDVG

SEQ ID NO: 85490 - protein, 9 aa, synthetic construct
  source 1..9: note = Seed: VVVGAGDVG (KRAS G13D)
FVVKATDVH

SEQ ID NO: 85491 - protein, 9 aa, synthetic construct
  source 1..9: note = Seed: VVVGAGDVG (KRAS G13D)
FVVKATDVI

SEQ ID NO: 85492 - protein, 9 aa, synthetic construct
  source 1..9: note = Seed: VVVGAGDVG (KRAS G13D)
FVVKATDVL

SEQ ID NO: 85493 - protein, 9 aa, synthetic construct
  source 1..9: note = Seed: VVVGAGDVG (KRAS G13D)
FVVKATDVM

SEQ ID NO: 85494 - protein, 9 aa, synthetic construct
  source 1..9: note = Seed: VVVGAGDVG (KRAS G13D)
FVVKATDVN

SEQ ID NO: 85495 - protein, 9 aa, synthetic construct
  source 1..9: note = Seed: VVVGAGDVG (KRAS G13D)
FVVKATDVP

SEQ ID NO: 85496 - protein, 9 aa, synthetic construct
  source 1..9: note = Seed: VVVGAGDVG (KRAS G13D)
FVVKATDVQ

SEQ ID NO: 85497 - protein, 9 aa, synthetic construct
  source 1..9: note = Seed: VVVGAGDVG (KRAS G13D)
FVVKATDVS

SEQ ID NO: 85498 - protein, 9 aa, synthetic construct
  source 1..9: note = Seed: VVVGAGDVG (KRAS G13D)
FVVKATDVT

SEQ ID NO: 85499 - protein, 9 aa, synthetic construct
  source 1..9: note = Seed: VVVGAGDVG (KRAS G13D)
FVVKATDVV

SEQ ID NO: 85500 - protein, 9 aa, synthetic construct
  source 1..9: note = Seed: VVVGAGDVG (KRAS G13D)
FVVKATDVY

SEQ ID NO: 85501 - protein, 9 aa, synthetic construct
  source 1..9: note = Seed: VVVGAGDVG (KRAS G13D)
FVVKAVDVA

SEQ ID NO: 85502 - protein, 9 aa, synthetic construct
  source 1..9: note = Seed: VVVGAGDVG (KRAS G13D)
FVVKAVDVC

SEQ ID NO: 85503 - protein, 9 aa, synthetic construct
  source 1..9: note = Seed: VVVGAGDVG (KRAS G13D)
FVVKAVDVD

SEQ ID NO: 85504 - protein, 9 aa, synthetic construct
  source 1..9: note = Seed: VVVGAGDVG (KRAS G13D)
FVVKAVDVE

SEQ ID NO: 85505 - protein, 9 aa, synthetic construct
  source 1..9: note = Seed: VVVGAGDVG (KRAS G13D)
FVVKAVDVG

SEQ ID NO: 85506 - protein, 9 aa, synthetic construct
  source 1..9: note = Seed: VVVGAGDVG (KRAS G13D)
FVVKAVDVH

SEQ ID NO: 85507 - protein, 9 aa, synthetic construct
  source 1..9: note = Seed: VVVGAGDVG (KRAS G13D)
FVVKAVDVI

SEQ ID NO: 85508 - protein, 9 aa, synthetic construct
  source 1..9: note = Seed: VVVGAGDVG (KRAS G13D)
FVVKAVDVL

SEQ ID NO: 85509 - protein, 9 aa, synthetic construct
  source 1..9: note = Seed: VVVGAGDVG (KRAS G13D)
FVVKAVDVM

SEQ ID NO: 85510 - protein, 9 aa, synthetic construct
  source 1..9: note = Seed: VVVGAGDVG (KRAS G13D)
FVVKAVDVN

SEQ ID NO: 85511 - protein, 9 aa, synthetic construct
  source 1..9: note = Seed: VVVGAGDVG (KRAS G13D)
FVVKAVDVQ

SEQ ID NO: 85512 - protein, 9 aa, synthetic construct
  source 1..9: note = Seed: VVVGAGDVG (KRAS G13D)
FVVKAVDVS

SEQ ID NO: 85513 - protein, 9 aa, synthetic construct
  source 1..9: note = Seed: VVVGAGDVG (KRAS G13D)
FVVKAVDVT

SEQ ID NO: 85514 - protein, 9 aa, synthetic construct
  source 1..9: note = Seed: VVVGAGDVG (KRAS G13D)
FVVKAVDVV

SEQ ID NO: 85515 - protein, 9 aa, synthetic construct
  source 1..9: note = Seed: VVVGAGDVG (KRAS G13D)
FVVLAADVA

SEQ ID NO: 85516 - protein, 9 aa, synthetic construct
  source 1..9: note = Seed: VVVGAGDVG (KRAS G13D)
FVVLAADVC

SEQ ID NO: 85517 - protein, 9 aa, synthetic construct
  source 1..9: note = Seed: VVVGAGDVG (KRAS G13D)
FVVLAADVD

SEQ ID NO: 85518 - protein, 9 aa, synthetic construct
  source 1..9: note = Seed: VVVGAGDVG (KRAS G13D)
FVVLAADVE

SEQ ID NO: 85519 - protein, 9 aa, synthetic construct
  source 1..9: note = Seed: VVVGAGDVG (KRAS G13D)
FVVLAADVF

SEQ ID NO: 85520 - protein, 9 aa, synthetic construct
  source 1..9: note = Seed: VVVGAGDVG (KRAS G13D)
FVVLAADVG

SEQ ID NO: 85521 - protein, 9 aa, synthetic construct
  source 1..9: note = Seed: VVVGAGDVG (KRAS G13D)
FVVLAADVH

SEQ ID NO: 85522 - protein, 9 aa, synthetic construct
  source 1..9: note = Seed: VVVGAGDVG (KRAS G13D)
FVVLAADVI

SEQ ID NO: 85523 - protein, 9 aa, synthetic construct
  source 1..9: note = Seed: VVVGAGDVG (KRAS G13D)
FVVLAADVK

SEQ ID NO: 85524 - protein, 9 aa, synthetic construct
  source 1..9: note = Seed: VVVGAGDVG (KRAS G13D)
FVVLAADVL

SEQ ID NO: 85525 - protein, 9 aa, synthetic construct
  source 1..9: note = Seed: VVVGAGDVG (KRAS G13D)
FVVLAADVM

SEQ ID NO: 85526 - protein, 9 aa, synthetic construct
  source 1..9: note = Seed: VVVGAGDVG (KRAS G13D)
FVVLAADVN

SEQ ID NO: 85527 - protein, 9 aa, synthetic construct
  source 1..9: note = Seed: VVVGAGDVG (KRAS G13D)
FVVLAADVP

SEQ ID NO: 85528 - protein, 9 aa, synthetic construct
  source 1..9: note = Seed: VVVGAGDVG (KRAS G13D)
FVVLAADVQ

SEQ ID NO: 85529 - protein, 9 aa, synthetic construct
  source 1..9: note = Seed: VVVGAGDVG (KRAS G13D)
FVVLAADVR

SEQ ID NO: 85530 - protein, 9 aa, synthetic construct
  source 1..9: note = Seed: VVVGAGDVG (KRAS G13D)
FVVLAADVS

SEQ ID NO: 85531 - protein, 9 aa, synthetic construct
  source 1..9: note = Seed: VVVGAGDVG (KRAS G13D)
FVVLAADVT

SEQ ID NO: 85532 - protein, 9 aa, synthetic construct
  source 1..9: note = Seed: VVVGAGDVG (KRAS G13D)
FVVLAADVV

SEQ ID NO: 85533 - protein, 9 aa, synthetic construct
  source 1..9: note = Seed: VVVGAGDVG (KRAS G13D)
FVVLAADVW

SEQ ID NO: 85534 - protein, 9 aa, synthetic construct
  source 1..9: note = Seed: VVVGAGDVG (KRAS G13D)
FVVLAADVY

SEQ ID NO: 85535 - protein, 9 aa, synthetic construct
  source 1..9: note = Seed: VVVGAGDVG (KRAS G13D)
FVVLACDVA

SEQ ID NO: 85536 - protein, 9 aa, synthetic construct
  source 1..9: note = Seed: VVVGAGDVG (KRAS G13D)
FVVLACDVH

SEQ ID NO: 85537 - protein, 9 aa, synthetic construct
  source 1..9: note = Seed: VVVGAGDVG (KRAS G13D)
FVVLACDVN

SEQ ID NO: 85538 - protein, 9 aa, synthetic construct
  source 1..9: note = Seed: VVVGAGDVG (KRAS G13D)
FVVLADDVA

SEQ ID NO: 85539 - protein, 9 aa, synthetic construct
  source 1..9: note = Seed: VVVGAGDVG (KRAS G13D)
FVVLADDVF

SEQ ID NO: 85540 - protein, 9 aa, synthetic construct
  source 1..9: note = Seed: VVVGAGDVG (KRAS G13D)
FVVLADDVG

SEQ ID NO: 85541 - protein, 9 aa, synthetic construct
  source 1..9: note = Seed: VVVGAGDVG (KRAS G13D)
FVVLADDVH

SEQ ID NO: 85542 - protein, 9 aa, synthetic construct
  source 1..9: note = Seed: VVVGAGDVG (KRAS G13D)
FVVLADDVI

SEQ ID NO: 85543 - protein, 9 aa, synthetic construct
  source 1..9: note = Seed: VVVGAGDVG (KRAS G13D)
FVVLADDVL

SEQ ID NO: 85544 - protein, 9 aa, synthetic construct
  source 1..9: note = Seed: VVVGAGDVG (KRAS G13D)
FVVLADDVM

SEQ ID NO: 85545 - protein, 9 aa, synthetic construct
  source 1..9: note = Seed: VVVGAGDVG (KRAS G13D)
FVVLADDVN

SEQ ID NO: 85546 - protein, 9 aa, synthetic construct
  source 1..9: note = Seed: VVVGAGDVG (KRAS G13D)
FVVLADDVP

SEQ ID NO: 85547 - protein, 9 aa, synthetic construct
  source 1..9: note = Seed: VVVGAGDVG (KRAS G13D)
FVVLADDVQ

SEQ ID NO: 85548 - protein, 9 aa, synthetic construct
  source 1..9: note = Seed: VVVGAGDVG (KRAS G13D)
FVVLADDVS

SEQ ID NO: 85549 - protein, 9 aa, synthetic construct
  source 1..9: note = Seed: VVVGAGDVG (KRAS G13D)
FVVLADDVT

SEQ ID NO: 85550 - protein, 9 aa, synthetic construct
  source 1..9: note = Seed: VVVGAGDVG (KRAS G13D)
FVVLADDVV

SEQ ID NO: 85551 - protein, 9 aa, synthetic construct
  source 1..9: note = Seed: VVVGAGDVG (KRAS G13D)
FVVLAEDVA

SEQ ID NO: 85552 - protein, 9 aa, synthetic construct
  source 1..9: note = Seed: VVVGAGDVG (KRAS G13D)
FVVLAEDVG

SEQ ID NO: 85553 - protein, 9 aa, synthetic construct
  source 1..9: note = Seed: VVVGAGDVG (KRAS G13D)
FVVLAEDVH

SEQ ID NO: 85554 - protein, 9 aa, synthetic construct
  source 1..9: note = Seed: VVVGAGDVG (KRAS G13D)
FVVLAEDVI

SEQ ID NO: 85555 - protein, 9 aa, synthetic construct
  source 1..9: note = Seed: VVVGAGDVG (KRAS G13D)
FVVLAEDVK

SEQ ID NO: 85556 - protein, 9 aa, synthetic construct
  source 1..9: note = Seed: VVVGAGDVG (KRAS G13D)
FVVLAEDVL

SEQ ID NO: 85557 - protein, 9 aa, synthetic construct
  source 1..9: note = Seed: VVVGAGDVG (KRAS G13D)
FVVLAEDVM

SEQ ID NO: 85558 - protein, 9 aa, synthetic construct
  source 1..9: note = Seed: VVVGAGDVG (KRAS G13D)
FVVLAEDVN

SEQ ID NO: 85559 - protein, 9 aa, synthetic construct
  source 1..9: note = Seed: VVVGAGDVG (KRAS G13D)
FVVLAEDVP

SEQ ID NO: 85560 - protein, 9 aa, synthetic construct
  source 1..9: note = Seed: VVVGAGDVG (KRAS G13D)
FVVLAEDVQ

SEQ ID NO: 85561 - protein, 9 aa, synthetic construct
  source 1..9: note = Seed: VVVGAGDVG (KRAS G13D)
FVVLAEDVR

SEQ ID NO: 85562 - protein, 9 aa, synthetic construct
  source 1..9: note = Seed: VVVGAGDVG (KRAS G13D)
FVVLAEDVS

SEQ ID NO: 85563 - protein, 9 aa, synthetic construct
  source 1..9: note = Seed: VVVGAGDVG (KRAS G13D)
FVVLAEDVT

SEQ ID NO: 85564 - protein, 9 aa, synthetic construct
  source 1..9: note = Seed: VVVGAGDVG (KRAS G13D)
FVVLAEDVV

SEQ ID NO: 85565 - protein, 9 aa, synthetic construct
  source 1..9: note = Seed: VVVGAGDVG (KRAS G13D)
FVVLAEDVY

SEQ ID NO: 85566 - protein, 9 aa, synthetic construct
  source 1..9: note = Seed: VVVGAGDVG (KRAS G13D)
FVVLAFDVA

SEQ ID NO: 85567 - protein, 9 aa, synthetic construct
  source 1..9: note = Seed: VVVGAGDVG (KRAS G13D)
FVVLAFDVH

SEQ ID NO: 85568 - protein, 9 aa, synthetic construct
  source 1..9: note = Seed: VVVGAGDVG (KRAS G13D)
FVVLAFDVN

SEQ ID NO: 85569 - protein, 9 aa, synthetic construct
  source 1..9: note = Seed: VVVGAGDVG (KRAS G13D)
FVVLAGDVA

SEQ ID NO: 85570 - protein, 9 aa, synthetic construct
  source 1..9: note = Seed: VVVGAGDVG (KRAS G13D)
FVVLAGDVD

SEQ ID NO: 85571 - protein, 9 aa, synthetic construct
  source 1..9: note = Seed: VVVGAGDVG (KRAS G13D)
FVVLAGDVE

SEQ ID NO: 85572 - protein, 9 aa, synthetic construct
  source 1..9: note = Seed: VVVGAGDVG (KRAS G13D)
FVVLAGDVF

SEQ ID NO: 85573 - protein, 9 aa, synthetic construct
  source 1..9: note = Seed: VVVGAGDVG (KRAS G13D)
FVVLAGDVG

SEQ ID NO: 85574 - protein, 9 aa, synthetic construct
  source 1..9: note = Seed: VVVGAGDVG (KRAS G13D)
FVVLAGDVH

SEQ ID NO: 85575 - protein, 9 aa, synthetic construct
  source 1..9: note = Seed: VVVGAGDVG (KRAS G13D)
FVVLAGDVI

SEQ ID NO: 85576 - protein, 9 aa, synthetic construct
  source 1..9: note = Seed: VVVGAGDVG (KRAS G13D)
FVVLAGDVK

SEQ ID NO: 85577 - protein, 9 aa, synthetic construct
  source 1..9: note = Seed: VVVGAGDVG (KRAS G13D)
FVVLAGDVL

SEQ ID NO: 85578 - protein, 9 aa, synthetic construct
  source 1..9: note = Seed: VVVGAGDVG (KRAS G13D)
FVVLAGDVM

SEQ ID NO: 85579 - protein, 9 aa, synthetic construct
  source 1..9: note = Seed: VVVGAGDVG (KRAS G13D)
FVVLAGDVN

SEQ ID NO: 85580 - protein, 9 aa, synthetic construct
  source 1..9: note = Seed: VVVGAGDVG (KRAS G13D)
FVVLAGDVP

SEQ ID NO: 85581 - protein, 9 aa, synthetic construct
  source 1..9: note = Seed: VVVGAGDVG (KRAS G13D)
FVVLAGDVQ

SEQ ID NO: 85582 - protein, 9 aa, synthetic construct
  source 1..9: note = Seed: VVVGAGDVG (KRAS G13D)
FVVLAGDVR

SEQ ID NO: 85583 - protein, 9 aa, synthetic construct
  source 1..9: note = Seed: VVVGAGDVG (KRAS G13D)
FVVLAGDVS

SEQ ID NO: 85584 - protein, 9 aa, synthetic construct
  source 1..9: note = Seed: VVVGAGDVG (KRAS G13D)
FVVLAGDVT

SEQ ID NO: 85585 - protein, 9 aa, synthetic construct
  source 1..9: note = Seed: VVVGAGDVG (KRAS G13D)
FVVLAGDVV

SEQ ID NO: 85586 - protein, 9 aa, synthetic construct
  source 1..9: note = Seed: VVVGAGDVG (KRAS G13D)
FVVLAGDVY

SEQ ID NO: 85587 - protein, 9 aa, synthetic construct
  source 1..9: note = Seed: VVVGAGDVG (KRAS G13D)
FVVLAHDVA

SEQ ID NO: 85588 - protein, 9 aa, synthetic construct
  source 1..9: note = Seed: VVVGAGDVG (KRAS G13D)
FVVLAHDVD

SEQ ID NO: 85589 - protein, 9 aa, synthetic construct
  source 1..9: note = Seed: VVVGAGDVG (KRAS G13D)
FVVLAHDVE

SEQ ID NO: 85590 - protein, 9 aa, synthetic construct
  source 1..9: note = Seed: VVVGAGDVG (KRAS G13D)
FVVLAHDVF

SEQ ID NO: 85591 - protein, 9 aa, synthetic construct
  source 1..9: note = Seed: VVVGAGDVG (KRAS G13D)
FVVLAHDVG

SEQ ID NO: 85592 - protein, 9 aa, synthetic construct
  source 1..9: note = Seed: VVVGAGDVG (KRAS G13D)
FVVLAHDVH

SEQ ID NO: 85593 - protein, 9 aa, synthetic construct
  source 1..9: note = Seed: VVVGAGDVG (KRAS G13D)
FVVLAHDVI

SEQ ID NO: 85594 - protein, 9 aa, synthetic construct
  source 1..9: note = Seed: VVVGAGDVG (KRAS G13D)
FVVLAHDVL

SEQ ID NO: 85595 - protein, 9 aa, synthetic construct
  source 1..9: note = Seed: VVVGAGDVG (KRAS G13D)
FVVLAHDVM

SEQ ID NO: 85596 - protein, 9 aa, synthetic construct
  source 1..9: note = Seed: VVVGAGDVG (KRAS G13D)
FVVLAHDVN

SEQ ID NO: 85597 - protein, 9 aa, synthetic construct
  source 1..9: note = Seed: VVVGAGDVG (KRAS G13D)
FVVLAHDVP

SEQ ID NO: 85598 - protein, 9 aa, synthetic construct
  source 1..9: note = Seed: VVVGAGDVG (KRAS G13D)
FVVLAHDVQ

SEQ ID NO: 85599 - protein, 9 aa, synthetic construct
  source 1..9: note = Seed: VVVGAGDVG (KRAS G13D)
FVVLAHDVR

SEQ ID NO: 85600 - protein, 9 aa, synthetic construct
  source 1..9: note = Seed: VVVGAGDVG (KRAS G13D)
FVVLAHDVS

SEQ ID NO: 85601 - protein, 9 aa, synthetic construct
  source 1..9: note = Seed: VVVGAGDVG (KRAS G13D)
FVVLAHDVT

SEQ ID NO: 85602 - protein, 9 aa, synthetic construct
  source 1..9: note = Seed: VVVGAGDVG (KRAS G13D)
FVVLAHDVV

SEQ ID NO: 85603 - protein, 9 aa, synthetic construct
  source 1..9: note = Seed: VVVGAGDVG (KRAS G13D)
FVVLAHDVY

SEQ ID NO: 85604 - protein, 9 aa, synthetic construct
  source 1..9: note = Seed: VVVGAGDVG (KRAS G13D)
FVVLAIDVA

SEQ ID NO: 85605 - protein, 9 aa, synthetic construct
  source 1..9: note = Seed: VVVGAGDVG (KRAS G13D)
FVVLAIDVD

SEQ ID NO: 85606 - protein, 9 aa, synthetic construct
  source 1..9: note = Seed: VVVGAGDVG (KRAS G13D)
FVVLAIDVE

SEQ ID NO: 85607 - protein, 9 aa, synthetic construct
  source 1..9: note = Seed: VVVGAGDVG (KRAS G13D)
FVVLAIDVF

SEQ ID NO: 85608 - protein, 9 aa, synthetic construct
  source 1..9: note = Seed: VVVGAGDVG (KRAS G13D)
FVVLAIDVG

SEQ ID NO: 85609 - protein, 9 aa, synthetic construct
  source 1..9: note = Seed: VVVGAGDVG (KRAS G13D)
FVVLAIDVH

SEQ ID NO: 85610 - protein, 9 aa, synthetic construct
  source 1..9: note = Seed: VVVGAGDVG (KRAS G13D)
FVVLAIDVI

SEQ ID NO: 85611 - protein, 9 aa, synthetic construct
  source 1..9: note = Seed: VVVGAGDVG (KRAS G13D)
FVVLAIDVK

SEQ ID NO: 85612 - protein, 9 aa, synthetic construct
  source 1..9: note = Seed: VVVGAGDVG (KRAS G13D)
FVVLAIDVL

SEQ ID NO: 85613 - protein, 9 aa, synthetic construct
  source 1..9: note = Seed: VVVGAGDVG (KRAS G13D)
FVVLAIDVM

SEQ ID NO: 85614 - protein, 9 aa, synthetic construct
  source 1..9: note = Seed: VVVGAGDVG (KRAS G13D)
FVVLAIDVN

SEQ ID NO: 85615 - protein, 9 aa, synthetic construct
  source 1..9: note = Seed: VVVGAGDVG (KRAS G13D)
FVVLAIDVP

SEQ ID NO: 85616 - protein, 9 aa, synthetic construct
  source 1..9: note = Seed: VVVGAGDVG (KRAS G13D)
FVVLAIDVQ

SEQ ID NO: 85617 - protein, 9 aa, synthetic construct
  source 1..9: note = Seed: VVVGAGDVG (KRAS G13D)
FVVLAIDVR

SEQ ID NO: 85618 - protein, 9 aa, synthetic construct
  source 1..9: note = Seed: VVVGAGDVG (KRAS G13D)
FVVLAIDVS

SEQ ID NO: 85619 - protein, 9 aa, synthetic construct
  source 1..9: note = Seed: VVVGAGDVG (KRAS G13D)
FVVLAIDVT

SEQ ID NO: 85620 - protein, 9 aa, synthetic construct
  source 1..9: note = Seed: VVVGAGDVG (KRAS G13D)
FVVLAIDVV

SEQ ID NO: 85621 - protein, 9 aa, synthetic construct
  source 1..9: note = Seed: VVVGAGDVG (KRAS G13D)
FVVLAIDVY

SEQ ID NO: 85622 - protein, 9 aa, synthetic construct
  source 1..9: note = Seed: VVVGAGDVG (KRAS G13D)
FVVLAKDVA

SEQ ID NO: 85623 - protein, 9 aa, synthetic construct
  source 1..9: note = Seed: VVVGAGDVG (KRAS G13D)
FVVLAKDVH

SEQ ID NO: 85624 - protein, 9 aa, synthetic construct
  source 1..9: note = Seed: VVVGAGDVG (KRAS G13D)
FVVLAKDVM

SEQ ID NO: 85625 - protein, 9 aa, synthetic construct
  source 1..9: note = Seed: VVVGAGDVG (KRAS G13D)
FVVLAKDVN

SEQ ID NO: 85626 - protein, 9 aa, synthetic construct
  source 1..9: note = Seed: VVVGAGDVG (KRAS G13D)
FVVLAKDVS

SEQ ID NO: 85627 - protein, 9 aa, synthetic construct
  source 1..9: note = Seed: VVVGAGDVG (KRAS G13D)
FVVLAKDVT

SEQ ID NO: 85628 - protein, 9 aa, synthetic construct
  source 1..9: note = Seed: VVVGAGDVG (KRAS G13D)
FVVLAKDVV

SEQ ID NO: 85629 - protein, 9 aa, synthetic construct
  source 1..9: note = Seed: VVVGAGDVG (KRAS G13D)
FVVLALDVA

SEQ ID NO: 85630 - protein, 9 aa, synthetic construct
  source 1..9: note = Seed: VVVGAGDVG (KRAS G13D)
FVVLALDVD

SEQ ID NO: 85631 - protein, 9 aa, synthetic construct
  source 1..9: note = Seed: VVVGAGDVG (KRAS G13D)
FVVLALDVG

SEQ ID NO: 85632 - protein, 9 aa, synthetic construct
  source 1..9: note = Seed: VVVGAGDVG (KRAS G13D)
FVVLALDVH

SEQ ID NO: 85633 - protein, 9 aa, synthetic construct
  source 1..9: note = Seed: VVVGAGDVG (KRAS G13D)
FVVLALDVM

SEQ ID NO: 85634 - protein, 9 aa, synthetic construct
  source 1..9: note = Seed: VVVGAGDVG (KRAS G13D)
FVVLALDVN

SEQ ID NO: 85635 - protein, 9 aa, synthetic construct
  source 1..9: note = Seed: VVVGAGDVG (KRAS G13D)
FVVLALDVS

SEQ ID NO: 85636 - protein, 9 aa, synthetic construct
  source 1..9: note = Seed: VVVGAGDVG (KRAS G13D)
FVVLALDVT

SEQ ID NO: 85637 - protein, 9 aa, synthetic construct
  source 1..9: note = Seed: VVVGAGDVG (KRAS G13D)
FVVLAMDVC

SEQ ID NO: 85638 - protein, 9 aa, synthetic construct
  source 1..9: note = Seed: VVVGAGDVG (KRAS G13D)
FVVLAMDVD

SEQ ID NO: 85639 - protein, 9 aa, synthetic construct
  source 1..9: note = Seed: VVVGAGDVG (KRAS G13D)
FVVLAMDVG

SEQ ID NO: 85640 - protein, 9 aa, synthetic construct
  source 1..9: note = Seed: VVVGAGDVG (KRAS G13D)
FVVLAMDVN

SEQ ID NO: 85641 - protein, 9 aa, synthetic construct
  source 1..9: note = Seed: VVVGAGDVG (KRAS G13D)
FVVLAMDVS

SEQ ID NO: 85642 - protein, 9 aa, synthetic construct
  source 1..9: note = Seed: VVVGAGDVG (KRAS G13D)
FVVLANDVA

SEQ ID NO: 85643 - protein, 9 aa, synthetic construct
  source 1..9: note = Seed: VVVGAGDVG (KRAS G13D)
FVVLANDVC

SEQ ID NO: 85644 - protein, 9 aa, synthetic construct
  source 1..9: note = Seed: VVVGAGDVG (KRAS G13D)
FVVLANDVD

SEQ ID NO: 85645 - protein, 9 aa, synthetic construct
  source 1..9: note = Seed: VVVGAGDVG (KRAS G13D)
FVVLANDVE

SEQ ID NO: 85646 - protein, 9 aa, synthetic construct
  source 1..9: note = Seed: VVVGAGDVG (KRAS G13D)
FVVLANDVF

SEQ ID NO: 85647 - protein, 9 aa, synthetic construct
  source 1..9: note = Seed: VVVGAGDVG (KRAS G13D)
FVVLANDVG

SEQ ID NO: 85648 - protein, 9 aa, synthetic construct
  source 1..9: note = Seed: VVVGAGDVG (KRAS G13D)
FVVLANDVH

SEQ ID NO: 85649 - protein, 9 aa, synthetic construct
  source 1..9: note = Seed: VVVGAGDVG (KRAS G13D)
FVVLANDVI

SEQ ID NO: 85650 - protein, 9 aa, synthetic construct
  source 1..9: note = Seed: VVVGAGDVG (KRAS G13D)
FVVLANDVK

SEQ ID NO: 85651 - protein, 9 aa, synthetic construct
  source 1..9: note = Seed: VVVGAGDVG (KRAS G13D)
FVVLANDVL

SEQ ID NO: 85652 - protein, 9 aa, synthetic construct
  source 1..9: note = Seed: VVVGAGDVG (KRAS G13D)
FVVLANDVM

SEQ ID NO: 85653 - protein, 9 aa, synthetic construct
  source 1..9: note = Seed: VVVGAGDVG (KRAS G13D)
FVVLANDVN

SEQ ID NO: 85654 - protein, 9 aa, synthetic construct
  source 1..9: note = Seed: VVVGAGDVG (KRAS G13D)
FVVLANDVP

SEQ ID NO: 85655 - protein, 9 aa, synthetic construct
  source 1..9: note = Seed: VVVGAGDVG (KRAS G13D)
FVVLANDVQ

SEQ ID NO: 85656 - protein, 9 aa, synthetic construct
  source 1..9: note = Seed: VVVGAGDVG (KRAS G13D)
FVVLANDVR

SEQ ID NO: 85657 - protein, 9 aa, synthetic construct
  source 1..9: note = Seed: VVVGAGDVG (KRAS G13D)
FVVLANDVS

SEQ ID NO: 85658 - protein, 9 aa, synthetic construct
  source 1..9: note = Seed: VVVGAGDVG (KRAS G13D)
FVVLANDVT

SEQ ID NO: 85659 - protein, 9 aa, synthetic construct
  source 1..9: note = Seed: VVVGAGDVG (KRAS G13D)
FVVLANDVV

SEQ ID NO: 85660 - protein, 9 aa, synthetic construct
  source 1..9: note = Seed: VVVGAGDVG (KRAS G13D)
FVVLANDVW

SEQ ID NO: 85661 - protein, 9 aa, synthetic construct
  source 1..9: note = Seed: VVVGAGDVG (KRAS G13D)
FVVLANDVY

SEQ ID NO: 85662 - protein, 9 aa, synthetic construct
  source 1..9: note = Seed: VVVGAGDVG (KRAS G13D)
FVVLAPDVA

SEQ ID NO: 85663 - protein, 9 aa, synthetic construct
  source 1..9: note = Seed: VVVGAGDVG (KRAS G13D)
FVVLAPDVC

SEQ ID NO: 85664 - protein, 9 aa, synthetic construct
  source 1..9: note = Seed: VVVGAGDVG (KRAS G13D)
FVVLAPDVD

SEQ ID NO: 85665 - protein, 9 aa, synthetic construct
  source 1..9: note = Seed: VVVGAGDVG (KRAS G13D)
FVVLAPDVE

SEQ ID NO: 85666 - protein, 9 aa, synthetic construct
  source 1..9: note = Seed: VVVGAGDVG (KRAS G13D)
FVVLAPDVF

SEQ ID NO: 85667 - protein, 9 aa, synthetic construct
  source 1..9: note = Seed: VVVGAGDVG (KRAS G13D)
FVVLAPDVG

SEQ ID NO: 85668 - protein, 9 aa, synthetic construct
  source 1..9: note = Seed: VVVGAGDVG (KRAS G13D)
FVVLAPDVH

SEQ ID NO: 85669 - protein, 9 aa, synthetic construct
  source 1..9: note = Seed: VVVGAGDVG (KRAS G13D)
FVVLAPDVI

SEQ ID NO: 85670 - protein, 9 aa, synthetic construct
  source 1..9: note = Seed: VVVGAGDVG (KRAS G13D)
FVVLAPDVK

SEQ ID NO: 85671 - protein, 9 aa, synthetic construct
  source 1..9: note = Seed: VVVGAGDVG (KRAS G13D)
FVVLAPDVL

SEQ ID NO: 85672 - protein, 9 aa, synthetic construct
  source 1..9: note = Seed: VVVGAGDVG (KRAS G13D)
FVVLAPDVM

SEQ ID NO: 85673 - protein, 9 aa, synthetic construct
  source 1..9: note = Seed: VVVGAGDVG (KRAS G13D)
FVVLAPDVN

SEQ ID NO: 85674 - protein, 9 aa, synthetic construct
  source 1..9: note = Seed: VVVGAGDVG (KRAS G13D)
FVVLAPDVP

SEQ ID NO: 85675 - protein, 9 aa, synthetic construct
  source 1..9: note = Seed: VVVGAGDVG (KRAS G13D)
FVVLAPDVQ

SEQ ID NO: 85676 - protein, 9 aa, synthetic construct
  source 1..9: note = Seed: VVVGAGDVG (KRAS G13D)
FVVLAPDVR

SEQ ID NO: 85677 - protein, 9 aa, synthetic construct
  source 1..9: note = Seed: VVVGAGDVG (KRAS G13D)
FVVLAPDVS

SEQ ID NO: 85678 - protein, 9 aa, synthetic construct
  source 1..9: note = Seed: VVVGAGDVG (KRAS G13D)
FVVLAPDVT

SEQ ID NO: 85679 - protein, 9 aa, synthetic construct
  source 1..9: note = Seed: VVVGAGDVG (KRAS G13D)
FVVLAPDVV

SEQ ID NO: 85680 - protein, 9 aa, synthetic construct
  source 1..9: note = Seed: VVVGAGDVG (KRAS G13D)
FVVLAPDVW

SEQ ID NO: 85681 - protein, 9 aa, synthetic construct
  source 1..9: note = Seed: VVVGAGDVG (KRAS G13D)
FVVLAPDVY

SEQ ID NO: 85682 - protein, 9 aa, synthetic construct
  source 1..9: note = Seed: VVVGAGDVG (KRAS G13D)
FVVLAQDVA

SEQ ID NO: 85683 - protein, 9 aa, synthetic construct
  source 1..9: note = Seed: VVVGAGDVG (KRAS G13D)
FVVLAQDVD

SEQ ID NO: 85684 - protein, 9 aa, synthetic construct
  source 1..9: note = Seed: VVVGAGDVG (KRAS G13D)
FVVLAQDVE

SEQ ID NO: 85685 - protein, 9 aa, synthetic construct
  source 1..9: note = Seed: VVVGAGDVG (KRAS G13D)
FVVLAQDVG

SEQ ID NO: 85686 - protein, 9 aa, synthetic construct
  source 1..9: note = Seed: VVVGAGDVG (KRAS G13D)
FVVLAQDVH

SEQ ID NO: 85687 - protein, 9 aa, synthetic construct
  source 1..9: note = Seed: VVVGAGDVG (KRAS G13D)
FVVLAQDVI

SEQ ID NO: 85688 - protein, 9 aa, synthetic construct
  source 1..9: note = Seed: VVVGAGDVG (KRAS G13D)
FVVLAQDVK

SEQ ID NO: 85689 - protein, 9 aa, synthetic construct
  source 1..9: note = Seed: VVVGAGDVG (KRAS G13D)
FVVLAQDVL

SEQ ID NO: 85690 - protein, 9 aa, synthetic construct
  source 1..9: note = Seed: VVVGAGDVG (KRAS G13D)
FVVLAQDVM

SEQ ID NO: 85691 - protein, 9 aa, synthetic construct
  source 1..9: note = Seed: VVVGAGDVG (KRAS G13D)
FVVLAQDVN

SEQ ID NO: 85692 - protein, 9 aa, synthetic construct
  source 1..9: note = Seed: VVVGAGDVG (KRAS G13D)
FVVLAQDVQ

SEQ ID NO: 85693 - protein, 9 aa, synthetic construct
  source 1..9: note = Seed: VVVGAGDVG (KRAS G13D)
FVVLAQDVR

SEQ ID NO: 85694 - protein, 9 aa, synthetic construct
  source 1..9: note = Seed: VVVGAGDVG (KRAS G13D)
FVVLAQDVS

SEQ ID NO: 85695 - protein, 9 aa, synthetic construct
  source 1..9: note = Seed: VVVGAGDVG (KRAS G13D)
FVVLAQDVT

SEQ ID NO: 85696 - protein, 9 aa, synthetic construct
  source 1..9: note = Seed: VVVGAGDVG (KRAS G13D)
FVVLAQDVV

SEQ ID NO: 85697 - protein, 9 aa, synthetic construct
  source 1..9: note = Seed: VVVGAGDVG (KRAS G13D)
FVVLAQDVY

SEQ ID NO: 85698 - protein, 9 aa, synthetic construct
  source 1..9: note = Seed: VVVGAGDVG (KRAS G13D)
FVVLARDVA

SEQ ID NO: 85699 - protein, 9 aa, synthetic construct
  source 1..9: note = Seed: VVVGAGDVG (KRAS G13D)
FVVLARDVH

SEQ ID NO: 85700 - protein, 9 aa, synthetic construct
  source 1..9: note = Seed: VVVGAGDVG (KRAS G13D)
FVVLARDVN

SEQ ID NO: 85701 - protein, 9 aa, synthetic construct
  source 1..9: note = Seed: VVVGAGDVG (KRAS G13D)
FVVLARDVP

SEQ ID NO: 85702 - protein, 9 aa, synthetic construct
  source 1..9: note = Seed: VVVGAGDVG (KRAS G13D)
FVVLARDVS

SEQ ID NO: 85703 - protein, 9 aa, synthetic construct
  source 1..9: note = Seed: VVVGAGDVG (KRAS G13D)
FVVLARDVT

SEQ ID NO: 85704 - protein, 9 aa, synthetic construct
  source 1..9: note = Seed: VVVGAGDVG (KRAS G13D)
FVVLASDVA

SEQ ID NO: 85705 - protein, 9 aa, synthetic construct
  source 1..9: note = Seed: VVVGAGDVG (KRAS G13D)
FVVLASDVC

SEQ ID NO: 85706 - protein, 9 aa, synthetic construct
  source 1..9: note = Seed: VVVGAGDVG (KRAS G13D)
FVVLASDVD

SEQ ID NO: 85707 - protein, 9 aa, synthetic construct
  source 1..9: note = Seed: VVVGAGDVG (KRAS G13D)
FVVLASDVE

SEQ ID NO: 85708 - protein, 9 aa, synthetic construct
  source 1..9: note = Seed: VVVGAGDVG (KRAS G13D)
FVVLASDVF

SEQ ID NO: 85709 - protein, 9 aa, synthetic construct
  source 1..9: note = Seed: VVVGAGDVG (KRAS G13D)
FVVLASDVG

SEQ ID NO: 85710 - protein, 9 aa, synthetic construct
  source 1..9: note = Seed: VVVGAGDVG (KRAS G13D)
FVVLASDVH

SEQ ID NO: 85711 - protein, 9 aa, synthetic construct
  source 1..9: note = Seed: VVVGAGDVG (KRAS G13D)
FVVLASDVI

SEQ ID NO: 85712 - protein, 9 aa, synthetic construct
  source 1..9: note = Seed: VVVGAGDVG (KRAS G13D)
FVVLASDVK

SEQ ID NO: 85713 - protein, 9 aa, synthetic construct
  source 1..9: note = Seed: VVVGAGDVG (KRAS G13D)
FVVLASDVL

SEQ ID NO: 85714 - protein, 9 aa, synthetic construct
  source 1..9: note = Seed: VVVGAGDVG (KRAS G13D)
FVVLASDVM

SEQ ID NO: 85715 - protein, 9 aa, synthetic construct
  source 1..9: note = Seed: VVVGAGDVG (KRAS G13D)
FVVLASDVN

SEQ ID NO: 85716 - protein, 9 aa, synthetic construct
  source 1..9: note = Seed: VVVGAGDVG (KRAS G13D)
FVVLASDVP

SEQ ID NO: 85717 - protein, 9 aa, synthetic construct
  source 1..9: note = Seed: VVVGAGDVG (KRAS G13D)
FVVLASDVQ

SEQ ID NO: 85718 - protein, 9 aa, synthetic construct
  source 1..9: note = Seed: VVVGAGDVG (KRAS G13D)
FVVLASDVR

SEQ ID NO: 85719 - protein, 9 aa, synthetic construct
  source 1..9: note = Seed: VVVGAGDVG (KRAS G13D)
FVVLASDVS

SEQ ID NO: 85720 - protein, 9 aa, synthetic construct
  source 1..9: note = Seed: VVVGAGDVG (KRAS G13D)
FVVLASDVT

SEQ ID NO: 85721 - protein, 9 aa, synthetic construct
  source 1..9: note = Seed: VVVGAGDVG (KRAS G13D)
FVVLASDVV

SEQ ID NO: 85722 - protein, 9 aa, synthetic construct
  source 1..9: note = Seed: VVVGAGDVG (KRAS G13D)
FVVLASDVW

SEQ ID NO: 85723 - protein, 9 aa, synthetic construct
  source 1..9: note = Seed: VVVGAGDVG (KRAS G13D)
FVVLASDVY

SEQ ID NO: 85724 - protein, 9 aa, synthetic construct
  source 1..9: note = Seed: VVVGAGDVG (KRAS G13D)
FVVLATDVA

SEQ ID NO: 85725 - protein, 9 aa, synthetic construct
  source 1..9: note = Seed: VVVGAGDVG (KRAS G13D)
FVVLATDVC

SEQ ID NO: 85726 - protein, 9 aa, synthetic construct
  source 1..9: note = Seed: VVVGAGDVG (KRAS G13D)
FVVLATDVD

SEQ ID NO: 85727 - protein, 9 aa, synthetic construct
  source 1..9: note = Seed: VVVGAGDVG (KRAS G13D)
FVVLATDVE

SEQ ID NO: 85728 - protein, 9 aa, synthetic construct
  source 1..9: note = Seed: VVVGAGDVG (KRAS G13D)
FVVLATDVF

SEQ ID NO: 85729 - protein, 9 aa, synthetic construct
  source 1..9: note = Seed: VVVGAGDVG (KRAS G13D)
FVVLATDVG

SEQ ID NO: 85730 - protein, 9 aa, synthetic construct
  source 1..9: note = Seed: VVVGAGDVG (KRAS G13D)
FVVLATDVH

SEQ ID NO: 85731 - protein, 9 aa, synthetic construct
  source 1..9: note = Seed: VVVGAGDVG (KRAS G13D)
FVVLATDVI

SEQ ID NO: 85732 - protein, 9 aa, synthetic construct
  source 1..9: note = Seed: VVVGAGDVG (KRAS G13D)
FVVLATDVK

SEQ ID NO: 85733 - protein, 9 aa, synthetic construct
  source 1..9: note = Seed: VVVGAGDVG (KRAS G13D)
FVVLATDVL

SEQ ID NO: 85734 - protein, 9 aa, synthetic construct
  source 1..9: note = Seed: VVVGAGDVG (KRAS G13D)
FVVLATDVM

SEQ ID NO: 85735 - protein, 9 aa, synthetic construct
  source 1..9: note = Seed: VVVGAGDVG (KRAS G13D)
FVVLATDVN

SEQ ID NO: 85736 - protein, 9 aa, synthetic construct
  source 1..9: note = Seed: VVVGAGDVG (KRAS G13D)
FVVLATDVP

SEQ ID NO: 85737 - protein, 9 aa, synthetic construct
  source 1..9: note = Seed: VVVGAGDVG (KRAS G13D)
FVVLATDVQ

SEQ ID NO: 85738 - protein, 9 aa, synthetic construct
  source 1..9: note = Seed: VVVGAGDVG (KRAS G13D)
FVVLATDVR

SEQ ID NO: 85739 - protein, 9 aa, synthetic construct
  source 1..9: note = Seed: VVVGAGDVG (KRAS G13D)
FVVLATDVS

SEQ ID NO: 85740 - protein, 9 aa, synthetic construct
  source 1..9: note = Seed: VVVGAGDVG (KRAS G13D)
FVVLATDVT

SEQ ID NO: 85741 - protein, 9 aa, synthetic construct
  source 1..9: note = Seed: VVVGAGDVG (KRAS G13D)
FVVLATDVV

SEQ ID NO: 85742 - protein, 9 aa, synthetic construct
  source 1..9: note = Seed: VVVGAGDVG (KRAS G13D)
FVVLATDVY

SEQ ID NO: 85743 - protein, 9 aa, synthetic construct
  source 1..9: note = Seed: VVVGAGDVG (KRAS G13D)
FVVLAVDVA

SEQ ID NO: 85744 - protein, 9 aa, synthetic construct
  source 1..9: note = Seed: VVVGAGDVG (KRAS G13D)
FVVLAVDVD

SEQ ID NO: 85745 - protein, 9 aa, synthetic construct
  source 1..9: note = Seed: VVVGAGDVG (KRAS G13D)
FVVLAVDVE

SEQ ID NO: 85746 - protein, 9 aa, synthetic construct
  source 1..9: note = Seed: VVVGAGDVG (KRAS G13D)
FVVLAVDVG

SEQ ID NO: 85747 - protein, 9 aa, synthetic construct
  source 1..9: note = Seed: VVVGAGDVG (KRAS G13D)
FVVLAVDVH

SEQ ID NO: 85748 - protein, 9 aa, synthetic construct
  source 1..9: note = Seed: VVVGAGDVG (KRAS G13D)
FVVLAVDVI

SEQ ID NO: 85749 - protein, 9 aa, synthetic construct
  source 1..9: note = Seed: VVVGAGDVG (KRAS G13D)
FVVLAVDVK

SEQ ID NO: 85750 - protein, 9 aa, synthetic construct
  source 1..9: note = Seed: VVVGAGDVG (KRAS G13D)
FVVLAVDVL

SEQ ID NO: 85751 - protein, 9 aa, synthetic construct
  source 1..9: note = Seed: VVVGAGDVG (KRAS G13D)
FVVLAVDVM

SEQ ID NO: 85752 - protein, 9 aa, synthetic construct
  source 1..9: note = Seed: VVVGAGDVG (KRAS G13D)
FVVLAVDVN

SEQ ID NO: 85753 - protein, 9 aa, synthetic construct
  source 1..9: note = Seed: VVVGAGDVG (KRAS G13D)
FVVLAVDVP

SEQ ID NO: 85754 - protein, 9 aa, synthetic construct
  source 1..9: note = Seed: VVVGAGDVG (KRAS G13D)
FVVLAVDVQ

SEQ ID NO: 85755 - protein, 9 aa, synthetic construct
  source 1..9: note = Seed: VVVGAGDVG (KRAS G13D)
FVVLAVDVR

SEQ ID NO: 85756 - protein, 9 aa, synthetic construct
  source 1..9: note = Seed: VVVGAGDVG (KRAS G13D)
FVVLAVDVS

SEQ ID NO: 85757 - protein, 9 aa, synthetic construct
  source 1..9: note = Seed: VVVGAGDVG (KRAS G13D)
FVVLAVDVT

SEQ ID NO: 85758 - protein, 9 aa, synthetic construct
  source 1..9: note = Seed: VVVGAGDVG (KRAS G13D)
FVVLAVDVV

SEQ ID NO: 85759 - protein, 9 aa, synthetic construct
  source 1..9: note = Seed: VVVGAGDVG (KRAS G13D)
FVVLAVDVY

SEQ ID NO: 85760 - protein, 9 aa, synthetic construct
  source 1..9: note = Seed: VVVGAGDVG (KRAS G13D)
FVVLAWDVA

SEQ ID NO: 85761 - protein, 9 aa, synthetic construct
  source 1..9: note = Seed: VVVGAGDVG (KRAS G13D)
FVVLAWDVH

SEQ ID NO: 85762 - protein, 9 aa, synthetic construct
  source 1..9: note = Seed: VVVGAGDVG (KRAS G13D)
FVVLAWDVN

SEQ ID NO: 85763 - protein, 9 aa, synthetic construct
  source 1..9: note = Seed: VVVGAGDVG (KRAS G13D)
FVVLAYDVA

SEQ ID NO: 85764 - protein, 9 aa, synthetic construct
  source 1..9: note = Seed: VVVGAGDVG (KRAS G13D)
FVVLAYDVH

SEQ ID NO: 85765 - protein, 9 aa, synthetic construct
  source 1..9: note = Seed: VVVGAGDVG (KRAS G13D)
FVVLAYDVN

SEQ ID NO: 85766 - protein, 9 aa, synthetic construct
  source 1..9: note = Seed: VVVGAGDVG (KRAS G13D)
FVVLAYDVS

SEQ ID NO: 85767 - protein, 9 aa, synthetic construct
  source 1..9: note = Seed: VVVGAGDVG (KRAS G13D)
FVVMAADVA

SEQ ID NO: 85768 - protein, 9 aa, synthetic construct
  source 1..9: note = Seed: VVVGAGDVG (KRAS G13D)
FVVMAADVC

SEQ ID NO: 85769 - protein, 9 aa, synthetic construct
  source 1..9: note = Seed: VVVGAGDVG (KRAS G13D)
FVVMAADVD

SEQ ID NO: 85770 - protein, 9 aa, synthetic construct
  source 1..9: note = Seed: VVVGAGDVG (KRAS G13D)
FVVMAADVE

SEQ ID NO: 85771 - protein, 9 aa, synthetic construct
  source 1..9: note = Seed: VVVGAGDVG (KRAS G13D)
FVVMAADVF

SEQ ID NO: 85772 - protein, 9 aa, synthetic construct
  source 1..9: note = Seed: VVVGAGDVG (KRAS G13D)
FVVMAADVG

SEQ ID NO: 85773 - protein, 9 aa, synthetic construct
  source 1..9: note = Seed: VVVGAGDVG (KRAS G13D)
FVVMAADVH

SEQ ID NO: 85774 - protein, 9 aa, synthetic construct
  source 1..9: note = Seed: VVVGAGDVG (KRAS G13D)
FVVMAADVI

SEQ ID NO: 85775 - protein, 9 aa, synthetic construct
  source 1..9: note = Seed: VVVGAGDVG (KRAS G13D)
FVVMAADVK

SEQ ID NO: 85776 - protein, 9 aa, synthetic construct
  source 1..9: note = Seed: VVVGAGDVG (KRAS G13D)
FVVMAADVL

SEQ ID NO: 85777 - protein, 9 aa, synthetic construct
  source 1..9: note = Seed: VVVGAGDVG (KRAS G13D)
FVVMAADVM

SEQ ID NO: 85778 - protein, 9 aa, synthetic construct
  source 1..9: note = Seed: VVVGAGDVG (KRAS G13D)
FVVMAADVN

SEQ ID NO: 85779 - protein, 9 aa, synthetic construct
  source 1..9: note = Seed: VVVGAGDVG (KRAS G13D)
FVVMAADVP

SEQ ID NO: 85780 - protein, 9 aa, synthetic construct
  source 1..9: note = Seed: VVVGAGDVG (KRAS G13D)
FVVMAADVQ

SEQ ID NO: 85781 - protein, 9 aa, synthetic construct
  source 1..9: note = Seed: VVVGAGDVG (KRAS G13D)
FVVMAADVR

SEQ ID NO: 85782 - protein, 9 aa, synthetic construct
  source 1..9: note = Seed: VVVGAGDVG (KRAS G13D)
FVVMAADVS

SEQ ID NO: 85783 - protein, 9 aa, synthetic construct
  source 1..9: note = Seed: VVVGAGDVG (KRAS G13D)
FVVMAADVT

SEQ ID NO: 85784 - protein, 9 aa, synthetic construct
  source 1..9: note = Seed: VVVGAGDVG (KRAS G13D)
FVVMAADVV

SEQ ID NO: 85785 - protein, 9 aa, synthetic construct
  source 1..9: note = Seed: VVVGAGDVG (KRAS G13D)
FVVMAADVW

SEQ ID NO: 85786 - protein, 9 aa, synthetic construct
  source 1..9: note = Seed: VVVGAGDVG (KRAS G13D)
FVVMAADVY

SEQ ID NO: 85787 - protein, 9 aa, synthetic construct
  source 1..9: note = Seed: VVVGAGDVG (KRAS G13D)
FVVMACDVA

SEQ ID NO: 85788 - protein, 9 aa, synthetic construct
  source 1..9: note = Seed: VVVGAGDVG (KRAS G13D)
FVVMACDVH

SEQ ID NO: 85789 - protein, 9 aa, synthetic construct
  source 1..9: note = Seed: VVVGAGDVG (KRAS G13D)
FVVMACDVN

SEQ ID NO: 85790 - protein, 9 aa, synthetic construct
  source 1..9: note = Seed: VVVGAGDVG (KRAS G13D)
FVVMACDVS

SEQ ID NO: 85791 - protein, 9 aa, synthetic construct
  source 1..9: note = Seed: VVVGAGDVG (KRAS G13D)
FVVMADDVA

SEQ ID NO: 85792 - protein, 9 aa, synthetic construct
  source 1..9: note = Seed: VVVGAGDVG (KRAS G13D)
FVVMADDVF

SEQ ID NO: 85793 - protein, 9 aa, synthetic construct
  source 1..9: note = Seed: VVVGAGDVG (KRAS G13D)
FVVMADDVG

SEQ ID NO: 85794 - protein, 9 aa, synthetic construct
  source 1..9: note = Seed: VVVGAGDVG (KRAS G13D)
FVVMADDVH

SEQ ID NO: 85795 - protein, 9 aa, synthetic construct
  source 1..9: note = Seed: VVVGAGDVG (KRAS G13D)
FVVMADDVI

SEQ ID NO: 85796 - protein, 9 aa, synthetic construct
  source 1..9: note = Seed: VVVGAGDVG (KRAS G13D)
FVVMADDVK

SEQ ID NO: 85797 - protein, 9 aa, synthetic construct
  source 1..9: note = Seed: VVVGAGDVG (KRAS G13D)
FVVMADDVL

SEQ ID NO: 85798 - protein, 9 aa, synthetic construct
  source 1..9: note = Seed: VVVGAGDVG (KRAS G13D)
FVVMADDVM

SEQ ID NO: 85799 - protein, 9 aa, synthetic construct
  source 1..9: note = Seed: VVVGAGDVG (KRAS G13D)
FVVMADDVN

SEQ ID NO: 85800 - protein, 9 aa, synthetic construct
  source 1..9: note = Seed: VVVGAGDVG (KRAS G13D)
FVVMADDVP

SEQ ID NO: 85801 - protein, 9 aa, synthetic construct
  source 1..9: note = Seed: VVVGAGDVG (KRAS G13D)
FVVMADDVQ

SEQ ID NO: 85802 - protein, 9 aa, synthetic construct
  source 1..9: note = Seed: VVVGAGDVG (KRAS G13D)
FVVMADDVR

SEQ ID NO: 85803 - protein, 9 aa, synthetic construct
  source 1..9: note = Seed: VVVGAGDVG (KRAS G13D)
FVVMADDVS

SEQ ID NO: 85804 - protein, 9 aa, synthetic construct
  source 1..9: note = Seed: VVVGAGDVG (KRAS G13D)
FVVMADDVT

SEQ ID NO: 85805 - protein, 9 aa, synthetic construct
  source 1..9: note = Seed: VVVGAGDVG (KRAS G13D)
FVVMADDVV

SEQ ID NO: 85806 - protein, 9 aa, synthetic construct
  source 1..9: note = Seed: VVVGAGDVG (KRAS G13D)
FVVMADDVY

SEQ ID NO: 85807 - protein, 9 aa, synthetic construct
  source 1..9: note = Seed: VVVGAGDVG (KRAS G13D)
FVVMAEDVA

SEQ ID NO: 85808 - protein, 9 aa, synthetic construct
  source 1..9: note = Seed: VVVGAGDVG (KRAS G13D)
FVVMAEDVD

SEQ ID NO: 85809 - protein, 9 aa, synthetic construct
  source 1..9: note = Seed: VVVGAGDVG (KRAS G13D)
FVVMAEDVE

SEQ ID NO: 85810 - protein, 9 aa, synthetic construct
  source 1..9: note = Seed: VVVGAGDVG (KRAS G13D)
FVVMAEDVF

SEQ ID NO: 85811 - protein, 9 aa, synthetic construct
  source 1..9: note = Seed: VVVGAGDVG (KRAS G13D)
FVVMAEDVG

SEQ ID NO: 85812 - protein, 9 aa, synthetic construct
  source 1..9: note = Seed: VVVGAGDVG (KRAS G13D)
FVVMAEDVH

SEQ ID NO: 85813 - protein, 9 aa, synthetic construct
  source 1..9: note = Seed: VVVGAGDVG (KRAS G13D)
FVVMAEDVI

SEQ ID NO: 85814 - protein, 9 aa, synthetic construct
  source 1..9: note = Seed: VVVGAGDVG (KRAS G13D)
FVVMAEDVK

SEQ ID NO: 85815 - protein, 9 aa, synthetic construct
  source 1..9: note = Seed: VVVGAGDVG (KRAS G13D)
FVVMAEDVL

SEQ ID NO: 85816 - protein, 9 aa, synthetic construct
  source 1..9: note = Seed: VVVGAGDVG (KRAS G13D)
FVVMAEDVM

SEQ ID NO: 85817 - protein, 9 aa, synthetic construct
  source 1..9: note = Seed: VVVGAGDVG (KRAS G13D)
FVVMAEDVN

SEQ ID NO: 85818 - protein, 9 aa, synthetic construct
  source 1..9: note = Seed: VVVGAGDVG (KRAS G13D)
FVVMAEDVP

SEQ ID NO: 85819 - protein, 9 aa, synthetic construct
  source 1..9: note = Seed: VVVGAGDVG (KRAS G13D)
FVVMAEDVQ

SEQ ID NO: 85820 - protein, 9 aa, synthetic construct
  source 1..9: note = Seed: VVVGAGDVG (KRAS G13D)
FVVMAEDVR

SEQ ID NO: 85821 - protein, 9 aa, synthetic construct
  source 1..9: note = Seed: VVVGAGDVG (KRAS G13D)
FVVMAEDVS

SEQ ID NO: 85822 - protein, 9 aa, synthetic construct
  source 1..9: note = Seed: VVVGAGDVG (KRAS G13D)
FVVMAEDVT

SEQ ID NO: 85823 - protein, 9 aa, synthetic construct
  source 1..9: note = Seed: VVVGAGDVG (KRAS G13D)
FVVMAEDVV

SEQ ID NO: 85824 - protein, 9 aa, synthetic construct
  source 1..9: note = Seed: VVVGAGDVG (KRAS G13D)
FVVMAEDVW

SEQ ID NO: 85825 - protein, 9 aa, synthetic construct
  source 1..9: note = Seed: VVVGAGDVG (KRAS G13D)
FVVMAEDVY

SEQ ID NO: 85826 - protein, 9 aa, synthetic construct
  source 1..9: note = Seed: VVVGAGDVG (KRAS G13D)
FVVMAFDVA

SEQ ID NO: 85827 - protein, 9 aa, synthetic construct
  source 1..9: note = Seed: VVVGAGDVG (KRAS G13D)
FVVMAFDVH

SEQ ID NO: 85828 - protein, 9 aa, synthetic construct
  source 1..9: note = Seed: VVVGAGDVG (KRAS G13D)
FVVMAFDVK

SEQ ID NO: 85829 - protein, 9 aa, synthetic construct
  source 1..9: note = Seed: VVVGAGDVG (KRAS G13D)
FVVMAFDVN

SEQ ID NO: 85830 - protein, 9 aa, synthetic construct
  source 1..9: note = Seed: VVVGAGDVG (KRAS G13D)
FVVMAFDVQ

SEQ ID NO: 85831 - protein, 9 aa, synthetic construct
  source 1..9: note = Seed: VVVGAGDVG (KRAS G13D)
FVVMAFDVR

SEQ ID NO: 85832 - protein, 9 aa, synthetic construct
  source 1..9: note = Seed: VVVGAGDVG (KRAS G13D)
FVVMAFDVS

SEQ ID NO: 85833 - protein, 9 aa, synthetic construct
  source 1..9: note = Seed: VVVGAGDVG (KRAS G13D)
FVVMAGDVA

SEQ ID NO: 85834 - protein, 9 aa, synthetic construct
  source 1..9: note = Seed: VVVGAGDVG (KRAS G13D)
FVVMAGDVC

SEQ ID NO: 85835 - protein, 9 aa, synthetic construct
  source 1..9: note = Seed: VVVGAGDVG (KRAS G13D)
FVVMAGDVD

SEQ ID NO: 85836 - protein, 9 aa, synthetic construct
  source 1..9: note = Seed: VVVGAGDVG (KRAS G13D)
FVVMAGDVE

SEQ ID NO: 85837 - protein, 9 aa, synthetic construct
  source 1..9: note = Seed: VVVGAGDVG (KRAS G13D)
FVVMAGDVF

SEQ ID NO: 85838 - protein, 9 aa, synthetic construct
  source 1..9: note = Seed: VVVGAGDVG (KRAS G13D)
FVVMAGDVG

SEQ ID NO: 85839 - protein, 9 aa, synthetic construct
  source 1..9: note = Seed: VVVGAGDVG (KRAS G13D)
FVVMAGDVH

SEQ ID NO: 85840 - protein, 9 aa, synthetic construct
  source 1..9: note = Seed: VVVGAGDVG (KRAS G13D)
FVVMAGDVI

SEQ ID NO: 85841 - protein, 9 aa, synthetic construct
  source 1..9: note = Seed: VVVGAGDVG (KRAS G13D)
FVVMAGDVK

SEQ ID NO: 85842 - protein, 9 aa, synthetic construct
  source 1..9: note = Seed: VVVGAGDVG (KRAS G13D)
FVVMAGDVL

SEQ ID NO: 85843 - protein, 9 aa, synthetic construct
  source 1..9: note = Seed: VVVGAGDVG (KRAS G13D)
FVVMAGDVM

SEQ ID NO: 85844 - protein, 9 aa, synthetic construct
  source 1..9: note = Seed: VVVGAGDVG (KRAS G13D)
FVVMAGDVN

SEQ ID NO: 85845 - protein, 9 aa, synthetic construct
  source 1..9: note = Seed: VVVGAGDVG (KRAS G13D)
FVVMAGDVP

SEQ ID NO: 85846 - protein, 9 aa, synthetic construct
  source 1..9: note = Seed: VVVGAGDVG (KRAS G13D)
FVVMAGDVQ

SEQ ID NO: 85847 - protein, 9 aa, synthetic construct
  source 1..9: note = Seed: VVVGAGDVG (KRAS G13D)
FVVMAGDVR

SEQ ID NO: 85848 - protein, 9 aa, synthetic construct
  source 1..9: note = Seed: VVVGAGDVG (KRAS G13D)
FVVMAGDVS

SEQ ID NO: 85849 - protein, 9 aa, synthetic construct
  source 1..9: note = Seed: VVVGAGDVG (KRAS G13D)
FVVMAGDVT

SEQ ID NO: 85850 - protein, 9 aa, synthetic construct
  source 1..9: note = Seed: VVVGAGDVG (KRAS G13D)
FVVMAGDVV

SEQ ID NO: 85851 - protein, 9 aa, synthetic construct
  source 1..9: note = Seed: VVVGAGDVG (KRAS G13D)
FVVMAGDVY

SEQ ID NO: 85852 - protein, 9 aa, synthetic construct
  source 1..9: note = Seed: VVVGAGDVG (KRAS G13D)
FVVMAHDVA

SEQ ID NO: 85853 - protein, 9 aa, synthetic construct
  source 1..9: note = Seed: VVVGAGDVG (KRAS G13D)
FVVMAHDVC

SEQ ID NO: 85854 - protein, 9 aa, synthetic construct
  source 1..9: note = Seed: VVVGAGDVG (KRAS G13D)
FVVMAHDVD

SEQ ID NO: 85855 - protein, 9 aa, synthetic construct
  source 1..9: note = Seed: VVVGAGDVG (KRAS G13D)
FVVMAHDVE

SEQ ID NO: 85856 - protein, 9 aa, synthetic construct
  source 1..9: note = Seed: VVVGAGDVG (KRAS G13D)
FVVMAHDVF

SEQ ID NO: 85857 - protein, 9 aa, synthetic construct
  source 1..9: note = Seed: VVVGAGDVG (KRAS G13D)
FVVMAHDVG

SEQ ID NO: 85858 - protein, 9 aa, synthetic construct
  source 1..9: note = Seed: VVVGAGDVG (KRAS G13D)
FVVMAHDVH

SEQ ID NO: 85859 - protein, 9 aa, synthetic construct
  source 1..9: note = Seed: VVVGAGDVG (KRAS G13D)
FVVMAHDVI

SEQ ID NO: 85860 - protein, 9 aa, synthetic construct
  source 1..9: note = Seed: VVVGAGDVG (KRAS G13D)
FVVMAHDVK

SEQ ID NO: 85861 - protein, 9 aa, synthetic construct
  source 1..9: note = Seed: VVVGAGDVG (KRAS G13D)
FVVMAHDVL

SEQ ID NO: 85862 - protein, 9 aa, synthetic construct
  source 1..9: note = Seed: VVVGAGDVG (KRAS G13D)
FVVMAHDVM

SEQ ID NO: 85863 - protein, 9 aa, synthetic construct
  source 1..9: note = Seed: VVVGAGDVG (KRAS G13D)
FVVMAHDVN

SEQ ID NO: 85864 - protein, 9 aa, synthetic construct
  source 1..9: note = Seed: VVVGAGDVG (KRAS G13D)
FVVMAHDVP

SEQ ID NO: 85865 - protein, 9 aa, synthetic construct
  source 1..9: note = Seed: VVVGAGDVG (KRAS G13D)
FVVMAHDVQ

SEQ ID NO: 85866 - protein, 9 aa, synthetic construct
  source 1..9: note = Seed: VVVGAGDVG (KRAS G13D)
FVVMAHDVR

SEQ ID NO: 85867 - protein, 9 aa, synthetic construct
  source 1..9: note = Seed: VVVGAGDVG (KRAS G13D)
FVVMAHDVS

SEQ ID NO: 85868 - protein, 9 aa, synthetic construct
  source 1..9: note = Seed: VVVGAGDVG (KRAS G13D)
FVVMAHDVT

SEQ ID NO: 85869 - protein, 9 aa, synthetic construct
  source 1..9: note = Seed: VVVGAGDVG (KRAS G13D)
FVVMAHDVV

SEQ ID NO: 85870 - protein, 9 aa, synthetic construct
  source 1..9: note = Seed: VVVGAGDVG (KRAS G13D)
FVVMAHDVW

SEQ ID NO: 85871 - protein, 9 aa, synthetic construct
  source 1..9: note = Seed: VVVGAGDVG (KRAS G13D)
FVVMAHDVY

SEQ ID NO: 85872 - protein, 9 aa, synthetic construct
  source 1..9: note = Seed: VVVGAGDVG (KRAS G13D)
FVVMAIDVA

SEQ ID NO: 85873 - protein, 9 aa, synthetic construct
  source 1..9: note = Seed: VVVGAGDVG (KRAS G13D)
FVVMAIDVC

SEQ ID NO: 85874 - protein, 9 aa, synthetic construct
  source 1..9: note = Seed: VVVGAGDVG (KRAS G13D)
FVVMAIDVD

SEQ ID NO: 85875 - protein, 9 aa, synthetic construct
  source 1..9: note = Seed: VVVGAGDVG (KRAS G13D)
FVVMAIDVE

SEQ ID NO: 85876 - protein, 9 aa, synthetic construct
  source 1..9: note = Seed: VVVGAGDVG (KRAS G13D)
FVVMAIDVF

SEQ ID NO: 85877 - protein, 9 aa, synthetic construct
  source 1..9: note = Seed: VVVGAGDVG (KRAS G13D)
FVVMAIDVG

SEQ ID NO: 85878 - protein, 9 aa, synthetic construct
  source 1..9: note = Seed: VVVGAGDVG (KRAS G13D)
FVVMAIDVH

SEQ ID NO: 85879 - protein, 9 aa, synthetic construct
  source 1..9: note = Seed: VVVGAGDVG (KRAS G13D)
FVVMAIDVI

SEQ ID NO: 85880 - protein, 9 aa, synthetic construct
  source 1..9: note = Seed: VVVGAGDVG (KRAS G13D)
FVVMAIDVK

SEQ ID NO: 85881 - protein, 9 aa, synthetic construct
  source 1..9: note = Seed: VVVGAGDVG (KRAS G13D)
FVVMAIDVL

SEQ ID NO: 85882 - protein, 9 aa, synthetic construct
  source 1..9: note = Seed: VVVGAGDVG (KRAS G13D)
FVVMAIDVM

SEQ ID NO: 85883 - protein, 9 aa, synthetic construct
  source 1..9: note = Seed: VVVGAGDVG (KRAS G13D)
FVVMAIDVN

SEQ ID NO: 85884 - protein, 9 aa, synthetic construct
  source 1..9: note = Seed: VVVGAGDVG (KRAS G13D)
FVVMAIDVP

SEQ ID NO: 85885 - protein, 9 aa, synthetic construct
  source 1..9: note = Seed: VVVGAGDVG (KRAS G13D)
FVVMAIDVQ

SEQ ID NO: 85886 - protein, 9 aa, synthetic construct
  source 1..9: note = Seed: VVVGAGDVG (KRAS G13D)
FVVMAIDVR

SEQ ID NO: 85887 - protein, 9 aa, synthetic construct
  source 1..9: note = Seed: VVVGAGDVG (KRAS G13D)
FVVMAIDVS

SEQ ID NO: 85888 - protein, 9 aa, synthetic construct
  source 1..9: note = Seed: VVVGAGDVG (KRAS G13D)
FVVMAIDVT

SEQ ID NO: 85889 - protein, 9 aa, synthetic construct
  source 1..9: note = Seed: VVVGAGDVG (KRAS G13D)
FVVMAIDVV

SEQ ID NO: 85890 - protein, 9 aa, synthetic construct
  source 1..9: note = Seed: VVVGAGDVG (KRAS G13D)
FVVMAIDVY

SEQ ID NO: 85891 - protein, 9 aa, synthetic construct
  source 1..9: note = Seed: VVVGAGDVG (KRAS G13D)
FVVMAKDVA

SEQ ID NO: 85892 - protein, 9 aa, synthetic construct
  source 1..9: note = Seed: VVVGAGDVG (KRAS G13D)
FVVMAKDVH

SEQ ID NO: 85893 - protein, 9 aa, synthetic construct
  source 1..9: note = Seed: VVVGAGDVG (KRAS G13D)
FVVMAKDVI

SEQ ID NO: 85894 - protein, 9 aa, synthetic construct
  source 1..9: note = Seed: VVVGAGDVG (KRAS G13D)
FVVMAKDVL

SEQ ID NO: 85895 - protein, 9 aa, synthetic construct
  source 1..9: note = Seed: VVVGAGDVG (KRAS G13D)
FVVMAKDVM

SEQ ID NO: 85896 - protein, 9 aa, synthetic construct
  source 1..9: note = Seed: VVVGAGDVG (KRAS G13D)
FVVMAKDVN

SEQ ID NO: 85897 - protein, 9 aa, synthetic construct
  source 1..9: note = Seed: VVVGAGDVG (KRAS G13D)
FVVMAKDVQ

SEQ ID NO: 85898 - protein, 9 aa, synthetic construct
  source 1..9: note = Seed: VVVGAGDVG (KRAS G13D)
FVVMAKDVR

SEQ ID NO: 85899 - protein, 9 aa, synthetic construct
  source 1..9: note = Seed: VVVGAGDVG (KRAS G13D)
FVVMAKDVS

SEQ ID NO: 85900 - protein, 9 aa, synthetic construct
  source 1..9: note = Seed: VVVGAGDVG (KRAS G13D)
FVVMAKDVT

SEQ ID NO: 85901 - protein, 9 aa, synthetic construct
  source 1..9: note = Seed: VVVGAGDVG (KRAS G13D)
FVVMAKDVV

SEQ ID NO: 85902 - protein, 9 aa, synthetic construct
  source 1..9: note = Seed: VVVGAGDVG (KRAS G13D)
FVVMALDVA

SEQ ID NO: 85903 - protein, 9 aa, synthetic construct
  source 1..9: note = Seed: VVVGAGDVG (KRAS G13D)
FVVMALDVC

SEQ ID NO: 85904 - protein, 9 aa, synthetic construct
  source 1..9: note = Seed: VVVGAGDVG (KRAS G13D)
FVVMALDVD

SEQ ID NO: 85905 - protein, 9 aa, synthetic construct
  source 1..9: note = Seed: VVVGAGDVG (KRAS G13D)
FVVMALDVE

SEQ ID NO: 85906 - protein, 9 aa, synthetic construct
  source 1..9: note = Seed: VVVGAGDVG (KRAS G13D)
FVVMALDVG

SEQ ID NO: 85907 - protein, 9 aa, synthetic construct
  source 1..9: note = Seed: VVVGAGDVG (KRAS G13D)
FVVMALDVH

SEQ ID NO: 85908 - protein, 9 aa, synthetic construct
  source 1..9: note = Seed: VVVGAGDVG (KRAS G13D)
FVVMALDVI

SEQ ID NO: 85909 - protein, 9 aa, synthetic construct
  source 1..9: note = Seed: VVVGAGDVG (KRAS G13D)
FVVMALDVM

SEQ ID NO: 85910 - protein, 9 aa, synthetic construct
  source 1..9: note = Seed: VVVGAGDVG (KRAS G13D)
FVVMALDVN

SEQ ID NO: 85911 - protein, 9 aa, synthetic construct
  source 1..9: note = Seed: VVVGAGDVG (KRAS G13D)
FVVMALDVQ

SEQ ID NO: 85912 - protein, 9 aa, synthetic construct
  source 1..9: note = Seed: VVVGAGDVG (KRAS G13D)
FVVMALDVS

SEQ ID NO: 85913 - protein, 9 aa, synthetic construct
  source 1..9: note = Seed: VVVGAGDVG (KRAS G13D)
FVVMALDVT

SEQ ID NO: 85914 - protein, 9 aa, synthetic construct
  source 1..9: note = Seed: VVVGAGDVG (KRAS G13D)
FVVMALDVV

SEQ ID NO: 85915 - protein, 9 aa, synthetic construct
  source 1..9: note = Seed: VVVGAGDVG (KRAS G13D)
FVVMAMDVA

SEQ ID NO: 85916 - protein, 9 aa, synthetic construct
  source 1..9: note = Seed: VVVGAGDVG (KRAS G13D)
FVVMAMDVC

SEQ ID NO: 85917 - protein, 9 aa, synthetic construct
  source 1..9: note = Seed: VVVGAGDVG (KRAS G13D)
FVVMAMDVD

SEQ ID NO: 85918 - protein, 9 aa, synthetic construct
  source 1..9: note = Seed: VVVGAGDVG (KRAS G13D)
FVVMAMDVG

SEQ ID NO: 85919 - protein, 9 aa, synthetic construct
  source 1..9: note = Seed: VVVGAGDVG (KRAS G13D)
FVVMAMDVH

SEQ ID NO: 85920 - protein, 9 aa, synthetic construct
  source 1..9: note = Seed: VVVGAGDVG (KRAS G13D)
FVVMAMDVM

SEQ ID NO: 85921 - protein, 9 aa, synthetic construct
  source 1..9: note = Seed: VVVGAGDVG (KRAS G13D)
FVVMAMDVN

SEQ ID NO: 85922 - protein, 9 aa, synthetic construct
  source 1..9: note = Seed: VVVGAGDVG (KRAS G13D)
FVVMAMDVS

SEQ ID NO: 85923 - protein, 9 aa, synthetic construct
  source 1..9: note = Seed: VVVGAGDVG (KRAS G13D)
FVVMAMDVT

SEQ ID NO: 85924 - protein, 9 aa, synthetic construct
  source 1..9: note = Seed: VVVGAGDVG (KRAS G13D)
FVVMANDVA

SEQ ID NO: 85925 - protein, 9 aa, synthetic construct
  source 1..9: note = Seed: VVVGAGDVG (KRAS G13D)
FVVMANDVC

SEQ ID NO: 85926 - protein, 9 aa, synthetic construct
  source 1..9: note = Seed: VVVGAGDVG (KRAS G13D)
FVVMANDVD

SEQ ID NO: 85927 - protein, 9 aa, synthetic construct
  source 1..9: note = Seed: VVVGAGDVG (KRAS G13D)
FVVMANDVE

SEQ ID NO: 85928 - protein, 9 aa, synthetic construct
  source 1..9: note = Seed: VVVGAGDVG (KRAS G13D)
FVVMANDVF

SEQ ID NO: 85929 - protein, 9 aa, synthetic construct
  source 1..9: note = Seed: VVVGAGDVG (KRAS G13D)
FVVMANDVG

SEQ ID NO: 85930 - protein, 9 aa, synthetic construct
  source 1..9: note = Seed: VVVGAGDVG (KRAS G13D)
FVVMANDVH

SEQ ID NO: 85931 - protein, 9 aa, synthetic construct
  source 1..9: note = Seed: VVVGAGDVG (KRAS G13D)
FVVMANDVI

SEQ ID NO: 85932 - protein, 9 aa, synthetic construct
  source 1..9: note = Seed: VVVGAGDVG (KRAS G13D)
FVVMANDVK

SEQ ID NO: 85933 - protein, 9 aa, synthetic construct
  source 1..9: note = Seed: VVVGAGDVG (KRAS G13D)
FVVMANDVL

SEQ ID NO: 85934 - protein, 9 aa, synthetic construct
  source 1..9: note = Seed: VVVGAGDVG (KRAS G13D)
FVVMANDVM

SEQ ID NO: 85935 - protein, 9 aa, synthetic construct
  source 1..9: note = Seed: VVVGAGDVG (KRAS G13D)
FVVMANDVN

SEQ ID NO: 85936 - protein, 9 aa, synthetic construct
  source 1..9: note = Seed: VVVGAGDVG (KRAS G13D)
FVVMANDVP

SEQ ID NO: 85937 - protein, 9 aa, synthetic construct
  source 1..9: note = Seed: VVVGAGDVG (KRAS G13D)
FVVMANDVQ

SEQ ID NO: 85938 - protein, 9 aa, synthetic construct
  source 1..9: note = Seed: VVVGAGDVG (KRAS G13D)
FVVMANDVR

SEQ ID NO: 85939 - protein, 9 aa, synthetic construct
  source 1..9: note = Seed: VVVGAGDVG (KRAS G13D)
FVVMANDVS

SEQ ID NO: 85940 - protein, 9 aa, synthetic construct
  source 1..9: note = Seed: VVVGAGDVG (KRAS G13D)
FVVMANDVT

SEQ ID NO: 85941 - protein, 9 aa, synthetic construct
  source 1..9: note = Seed: VVVGAGDVG (KRAS G13D)
FVVMANDVV

SEQ ID NO: 85942 - protein, 9 aa, synthetic construct
  source 1..9: note = Seed: VVVGAGDVG (KRAS G13D)
FVVMANDVW

SEQ ID NO: 85943 - protein, 9 aa, synthetic construct
  source 1..9: note = Seed: VVVGAGDVG (KRAS G13D)
FVVMANDVY

SEQ ID NO: 85944 - protein, 9 aa, synthetic construct
  source 1..9: note = Seed: VVVGAGDVG (KRAS G13D)
FVVMAPDVA

SEQ ID NO: 85945 - protein, 9 aa, synthetic construct
  source 1..9: note = Seed: VVVGAGDVG (KRAS G13D)
FVVMAPDVC

SEQ ID NO: 85946 - protein, 9 aa, synthetic construct
  source 1..9: note = Seed: VVVGAGDVG (KRAS G13D)
FVVMAPDVD

SEQ ID NO: 85947 - protein, 9 aa, synthetic construct
  source 1..9: note = Seed: VVVGAGDVG (KRAS G13D)
FVVMAPDVE

SEQ ID NO: 85948 - protein, 9 aa, synthetic construct
  source 1..9: note = Seed: VVVGAGDVG (KRAS G13D)
FVVMAPDVF

SEQ ID NO: 85949 - protein, 9 aa, synthetic construct
  source 1..9: note = Seed: VVVGAGDVG (KRAS G13D)
FVVMAPDVG

SEQ ID NO: 85950 - protein, 9 aa, synthetic construct
  source 1..9: note = Seed: VVVGAGDVG (KRAS G13D)
FVVMAPDVH

SEQ ID NO: 85951 - protein, 9 aa, synthetic construct
  source 1..9: note = Seed: VVVGAGDVG (KRAS G13D)
FVVMAPDVI

SEQ ID NO: 85952 - protein, 9 aa, synthetic construct
  source 1..9: note = Seed: VVVGAGDVG (KRAS G13D)
FVVMAPDVK

SEQ ID NO: 85953 - protein, 9 aa, synthetic construct
  source 1..9: note = Seed: VVVGAGDVG (KRAS G13D)
FVVMAPDVL

SEQ ID NO: 85954 - protein, 9 aa, synthetic construct
  source 1..9: note = Seed: VVVGAGDVG (KRAS G13D)
FVVMAPDVM

SEQ ID NO: 85955 - protein, 9 aa, synthetic construct
  source 1..9: note = Seed: VVVGAGDVG (KRAS G13D)
FVVMAPDVN

SEQ ID NO: 85956 - protein, 9 aa, synthetic construct
  source 1..9: note = Seed: VVVGAGDVG (KRAS G13D)
FVVMAPDVP

SEQ ID NO: 85957 - protein, 9 aa, synthetic construct
  source 1..9: note = Seed: VVVGAGDVG (KRAS G13D)
FVVMAPDVQ

SEQ ID NO: 85958 - protein, 9 aa, synthetic construct
  source 1..9: note = Seed: VVVGAGDVG (KRAS G13D)
FVVMAPDVR

SEQ ID NO: 85959 - protein, 9 aa, synthetic construct
  source 1..9: note = Seed: VVVGAGDVG (KRAS G13D)
FVVMAPDVS

SEQ ID NO: 85960 - protein, 9 aa, synthetic construct
  source 1..9: note = Seed: VVVGAGDVG (KRAS G13D)
FVVMAPDVT

SEQ ID NO: 85961 - protein, 9 aa, synthetic construct
  source 1..9: note = Seed: VVVGAGDVG (KRAS G13D)
FVVMAPDVV

SEQ ID NO: 85962 - protein, 9 aa, synthetic construct
  source 1..9: note = Seed: VVVGAGDVG (KRAS G13D)
FVVMAPDVW

SEQ ID NO: 85963 - protein, 9 aa, synthetic construct
  source 1..9: note = Seed: VVVGAGDVG (KRAS G13D)
FVVMAPDVY

SEQ ID NO: 85964 - protein, 9 aa, synthetic construct
  source 1..9: note = Seed: VVVGAGDVG (KRAS G13D)
FVVMAQDVA

SEQ ID NO: 85965 - protein, 9 aa, synthetic construct
  source 1..9: note = Seed: VVVGAGDVG (KRAS G13D)
FVVMAQDVC

SEQ ID NO: 85966 - protein, 9 aa, synthetic construct
  source 1..9: note = Seed: VVVGAGDVG (KRAS G13D)
FVVMAQDVD

SEQ ID NO: 85967 - protein, 9 aa, synthetic construct
  source 1..9: note = Seed: VVVGAGDVG (KRAS G13D)
FVVMAQDVE

SEQ ID NO: 85968 - protein, 9 aa, synthetic construct
  source 1..9: note = Seed: VVVGAGDVG (KRAS G13D)
FVVMAQDVF

SEQ ID NO: 85969 - protein, 9 aa, synthetic construct
  source 1..9: note = Seed: VVVGAGDVG (KRAS G13D)
FVVMAQDVG

SEQ ID NO: 85970 - protein, 9 aa, synthetic construct
  source 1..9: note = Seed: VVVGAGDVG (KRAS G13D)
FVVMAQDVH

SEQ ID NO: 85971 - protein, 9 aa, synthetic construct
  source 1..9: note = Seed: VVVGAGDVG (KRAS G13D)
FVVMAQDVI

SEQ ID NO: 85972 - protein, 9 aa, synthetic construct
  source 1..9: note = Seed: VVVGAGDVG (KRAS G13D)
FVVMAQDVK

SEQ ID NO: 85973 - protein, 9 aa, synthetic construct
  source 1..9: note = Seed: VVVGAGDVG (KRAS G13D)
FVVMAQDVL

SEQ ID NO: 85974 - protein, 9 aa, synthetic construct
  source 1..9: note = Seed: VVVGAGDVG (KRAS G13D)
FVVMAQDVM

SEQ ID NO: 85975 - protein, 9 aa, synthetic construct
  source 1..9: note = Seed: VVVGAGDVG (KRAS G13D)
FVVMAQDVN

SEQ ID NO: 85976 - protein, 9 aa, synthetic construct
  source 1..9: note = Seed: VVVGAGDVG (KRAS G13D)
FVVMAQDVP

SEQ ID NO: 85977 - protein, 9 aa, synthetic construct
  source 1..9: note = Seed: VVVGAGDVG (KRAS G13D)
FVVMAQDVQ

SEQ ID NO: 85978 - protein, 9 aa, synthetic construct
  source 1..9: note = Seed: VVVGAGDVG (KRAS G13D)
FVVMAQDVR

SEQ ID NO: 85979 - protein, 9 aa, synthetic construct
  source 1..9: note = Seed: VVVGAGDVG (KRAS G13D)
FVVMAQDVS

SEQ ID NO: 85980 - protein, 9 aa, synthetic construct
  source 1..9: note = Seed: VVVGAGDVG (KRAS G13D)
FVVMAQDVT

SEQ ID NO: 85981 - protein, 9 aa, synthetic construct
  source 1..9: note = Seed: VVVGAGDVG (KRAS G13D)
FVVMAQDVV

SEQ ID NO: 85982 - protein, 9 aa, synthetic construct
  source 1..9: note = Seed: VVVGAGDVG (KRAS G13D)
FVVMAQDVY

SEQ ID NO: 85983 - protein, 9 aa, synthetic construct
  source 1..9: note = Seed: VVVGAGDVG (KRAS G13D)
FVVMARDVA

SEQ ID NO: 85984 - protein, 9 aa, synthetic construct
  source 1..9: note = Seed: VVVGAGDVG (KRAS G13D)
FVVMARDVD

SEQ ID NO: 85985 - protein, 9 aa, synthetic construct
  source 1..9: note = Seed: VVVGAGDVG (KRAS G13D)
FVVMARDVE

SEQ ID NO: 85986 - protein, 9 aa, synthetic construct
  source 1..9: note = Seed: VVVGAGDVG (KRAS G13D)
FVVMARDVF

SEQ ID NO: 85987 - protein, 9 aa, synthetic construct
  source 1..9: note = Seed: VVVGAGDVG (KRAS G13D)
FVVMARDVH

SEQ ID NO: 85988 - protein, 9 aa, synthetic construct
  source 1..9: note = Seed: VVVGAGDVG (KRAS G13D)
FVVMARDVI

SEQ ID NO: 85989 - protein, 9 aa, synthetic construct
  source 1..9: note = Seed: VVVGAGDVG (KRAS G13D)
FVVMARDVL

SEQ ID NO: 85990 - protein, 9 aa, synthetic construct
  source 1..9: note = Seed: VVVGAGDVG (KRAS G13D)
FVVMARDVM

SEQ ID NO: 85991 - protein, 9 aa, synthetic construct
  source 1..9: note = Seed: VVVGAGDVG (KRAS G13D)
FVVMARDVN

SEQ ID NO: 85992 - protein, 9 aa, synthetic construct
  source 1..9: note = Seed: VVVGAGDVG (KRAS G13D)
FVVMARDVP

SEQ ID NO: 85993 - protein, 9 aa, synthetic construct
  source 1..9: note = Seed: VVVGAGDVG (KRAS G13D)
FVVMARDVQ

SEQ ID NO: 85994 - protein, 9 aa, synthetic construct
  source 1..9: note = Seed: VVVGAGDVG (KRAS G13D)
FVVMARDVR

SEQ ID NO: 85995 - protein, 9 aa, synthetic construct
  source 1..9: note = Seed: VVVGAGDVG (KRAS G13D)
FVVMARDVS

SEQ ID NO: 85996 - protein, 9 aa, synthetic construct
  source 1..9: note = Seed: VVVGAGDVG (KRAS G13D)
FVVMARDVT

SEQ ID NO: 85997 - protein, 9 aa, synthetic construct
  source 1..9: note = Seed: VVVGAGDVG (KRAS G13D)
FVVMARDVV

SEQ ID NO: 85998 - protein, 9 aa, synthetic construct
  source 1..9: note = Seed: VVVGAGDVG (KRAS G13D)
FVVMARDVY

SEQ ID NO: 85999 - protein, 9 aa, synthetic construct
  source 1..9: note = Seed: VVVGAGDVG (KRAS G13D)
FVVMASDVA

SEQ ID NO: 86000 - protein, 9 aa, synthetic construct
  source 1..9: note = Seed: VVVGAGDVG (KRAS G13D)
FVVMASDVC

SEQ ID NO: 86001 - protein, 9 aa, synthetic construct
  source 1..9: note = Seed: VVVGAGDVG (KRAS G13D)
FVVMASDVD

SEQ ID NO: 86002 - protein, 9 aa, synthetic construct
  source 1..9: note = Seed: VVVGAGDVG (KRAS G13D)
FVVMASDVE

SEQ ID NO: 86003 - protein, 9 aa, synthetic construct
  source 1..9: note = Seed: VVVGAGDVG (KRAS G13D)
FVVMASDVF

SEQ ID NO: 86004 - protein, 9 aa, synthetic construct
  source 1..9: note = Seed: VVVGAGDVG (KRAS G13D)
FVVMASDVG

SEQ ID NO: 86005 - protein, 9 aa, synthetic construct
  source 1..9: note = Seed: VVVGAGDVG (KRAS G13D)
FVVMASDVH

SEQ ID NO: 86006 - protein, 9 aa, synthetic construct
  source 1..9: note = Seed: VVVGAGDVG (KRAS G13D)
FVVMASDVI

SEQ ID NO: 86007 - protein, 9 aa, synthetic construct
  source 1..9: note = Seed: VVVGAGDVG (KRAS G13D)
FVVMASDVK

SEQ ID NO: 86008 - protein, 9 aa, synthetic construct
  source 1..9: note = Seed: VVVGAGDVG (KRAS G13D)
FVVMASDVL

SEQ ID NO: 86009 - protein, 9 aa, synthetic construct
  source 1..9: note = Seed: VVVGAGDVG (KRAS G13D)
FVVMASDVM

SEQ ID NO: 86010 - protein, 9 aa, synthetic construct
  source 1..9: note = Seed: VVVGAGDVG (KRAS G13D)
FVVMASDVN

SEQ ID NO: 86011 - protein, 9 aa, synthetic construct
  source 1..9: note = Seed: VVVGAGDVG (KRAS G13D)
FVVMASDVP

SEQ ID NO: 86012 - protein, 9 aa, synthetic construct
  source 1..9: note = Seed: VVVGAGDVG (KRAS G13D)
FVVMASDVQ

SEQ ID NO: 86013 - protein, 9 aa, synthetic construct
  source 1..9: note = Seed: VVVGAGDVG (KRAS G13D)
FVVMASDVR

SEQ ID NO: 86014 - protein, 9 aa, synthetic construct
  source 1..9: note = Seed: VVVGAGDVG (KRAS G13D)
FVVMASDVS

SEQ ID NO: 86015 - protein, 9 aa, synthetic construct
  source 1..9: note = Seed: VVVGAGDVG (KRAS G13D)
FVVMASDVT

SEQ ID NO: 86016 - protein, 9 aa, synthetic construct
  source 1..9: note = Seed: VVVGAGDVG (KRAS G13D)
FVVMASDVV

SEQ ID NO: 86017 - protein, 9 aa, synthetic construct
  source 1..9: note = Seed: VVVGAGDVG (KRAS G13D)
FVVMASDVW

SEQ ID NO: 86018 - protein, 9 aa, synthetic construct
  source 1..9: note = Seed: VVVGAGDVG (KRAS G13D)
FVVMASDVY

SEQ ID NO: 86019 - protein, 9 aa, synthetic construct
  source 1..9: note = Seed: VVVGAGDVG (KRAS G13D)
FVVMATDVA

SEQ ID NO: 86020 - protein, 9 aa, synthetic construct
  source 1..9: note = Seed: VVVGAGDVG (KRAS G13D)
FVVMATDVC

SEQ ID NO: 86021 - protein, 9 aa, synthetic construct
  source 1..9: note = Seed: VVVGAGDVG (KRAS G13D)
FVVMATDVD

SEQ ID NO: 86022 - protein, 9 aa, synthetic construct
  source 1..9: note = Seed: VVVGAGDVG (KRAS G13D)
FVVMATDVE

SEQ ID NO: 86023 - protein, 9 aa, synthetic construct
  source 1..9: note = Seed: VVVGAGDVG (KRAS G13D)
FVVMATDVF

SEQ ID NO: 86024 - protein, 9 aa, synthetic construct
  source 1..9: note = Seed: VVVGAGDVG (KRAS G13D)
FVVMATDVG

SEQ ID NO: 86025 - protein, 9 aa, synthetic construct
  source 1..9: note = Seed: VVVGAGDVG (KRAS G13D)
FVVMATDVH

SEQ ID NO: 86026 - protein, 9 aa, synthetic construct
  source 1..9: note = Seed: VVVGAGDVG (KRAS G13D)
FVVMATDVI

SEQ ID NO: 86027 - protein, 9 aa, synthetic construct
  source 1..9: note = Seed: VVVGAGDVG (KRAS G13D)
FVVMATDVK

SEQ ID NO: 86028 - protein, 9 aa, synthetic construct
  source 1..9: note = Seed: VVVGAGDVG (KRAS G13D)
FVVMATDVL

SEQ ID NO: 86029 - protein, 9 aa, synthetic construct
  source 1..9: note = Seed: VVVGAGDVG (KRAS G13D)
FVVMATDVM

SEQ ID NO: 86030 - protein, 9 aa, synthetic construct
  source 1..9: note = Seed: VVVGAGDVG (KRAS G13D)
FVVMATDVN

SEQ ID NO: 86031 - protein, 9 aa, synthetic construct
  source 1..9: note = Seed: VVVGAGDVG (KRAS G13D)
FVVMATDVP

SEQ ID NO: 86032 - protein, 9 aa, synthetic construct
  source 1..9: note = Seed: VVVGAGDVG (KRAS G13D)
FVVMATDVQ

SEQ ID NO: 86033 - protein, 9 aa, synthetic construct
  source 1..9: note = Seed: VVVGAGDVG (KRAS G13D)
FVVMATDVR

SEQ ID NO: 86034 - protein, 9 aa, synthetic construct
  source 1..9: note = Seed: VVVGAGDVG (KRAS G13D)
FVVMATDVS

SEQ ID NO: 86035 - protein, 9 aa, synthetic construct
  source 1..9: note = Seed: VVVGAGDVG (KRAS G13D)
FVVMATDVT

SEQ ID NO: 86036 - protein, 9 aa, synthetic construct
  source 1..9: note = Seed: VVVGAGDVG (KRAS G13D)
FVVMATDVV

SEQ ID NO: 86037 - protein, 9 aa, synthetic construct
  source 1..9: note = Seed: VVVGAGDVG (KRAS G13D)
FVVMATDVW

SEQ ID NO: 86038 - protein, 9 aa, synthetic construct
  source 1..9: note = Seed: VVVGAGDVG (KRAS G13D)
FVVMATDVY

SEQ ID NO: 86039 - protein, 9 aa, synthetic construct
  source 1..9: note = Seed: VVVGAGDVG (KRAS G13D)
FVVMAVDVA

SEQ ID NO: 86040 - protein, 9 aa, synthetic construct
  source 1..9: note = Seed: VVVGAGDVG (KRAS G13D)
FVVMAVDVC

SEQ ID NO: 86041 - protein, 9 aa, synthetic construct
  source 1..9: note = Seed: VVVGAGDVG (KRAS G13D)
FVVMAVDVD

SEQ ID NO: 86042 - protein, 9 aa, synthetic construct
  source 1..9: note = Seed: VVVGAGDVG (KRAS G13D)
FVVMAVDVE

SEQ ID NO: 86043 - protein, 9 aa, synthetic construct
  source 1..9: note = Seed: VVVGAGDVG (KRAS G13D)
FVVMAVDVF

SEQ ID NO: 86044 - protein, 9 aa, synthetic construct
  source 1..9: note = Seed: VVVGAGDVG (KRAS G13D)
FVVMAVDVG

SEQ ID NO: 86045 - protein, 9 aa, synthetic construct
  source 1..9: note = Seed: VVVGAGDVG (KRAS G13D)
FVVMAVDVH

SEQ ID NO: 86046 - protein, 9 aa, synthetic construct
  source 1..9: note = Seed: VVVGAGDVG (KRAS G13D)
FVVMAVDVI

SEQ ID NO: 86047 - protein, 9 aa, synthetic construct
  source 1..9: note = Seed: VVVGAGDVG (KRAS G13D)
FVVMAVDVK

SEQ ID NO: 86048 - protein, 9 aa, synthetic construct
  source 1..9: note = Seed: VVVGAGDVG (KRAS G13D)
FVVMAVDVL

SEQ ID NO: 86049 - protein, 9 aa, synthetic construct
  source 1..9: note = Seed: VVVGAGDVG (KRAS G13D)
FVVMAVDVM

SEQ ID NO: 86050 - protein, 9 aa, synthetic construct
  source 1..9: note = Seed: VVVGAGDVG (KRAS G13D)
FVVMAVDVN

SEQ ID NO: 86051 - protein, 9 aa, synthetic construct
  source 1..9: note = Seed: VVVGAGDVG (KRAS G13D)
FVVMAVDVP

SEQ ID NO: 86052 - protein, 9 aa, synthetic construct
  source 1..9: note = Seed: VVVGAGDVG (KRAS G13D)
FVVMAVDVQ

SEQ ID NO: 86053 - protein, 9 aa, synthetic construct
  source 1..9: note = Seed: VVVGAGDVG (KRAS G13D)
FVVMAVDVR

SEQ ID NO: 86054 - protein, 9 aa, synthetic construct
  source 1..9: note = Seed: VVVGAGDVG (KRAS G13D)
FVVMAVDVS

SEQ ID NO: 86055 - protein, 9 aa, synthetic construct
  source 1..9: note = Seed: VVVGAGDVG (KRAS G13D)
FVVMAVDVT

SEQ ID NO: 86056 - protein, 9 aa, synthetic construct
  source 1..9: note = Seed: VVVGAGDVG (KRAS G13D)
FVVMAVDVV

SEQ ID NO: 86057 - protein, 9 aa, synthetic construct
  source 1..9: note = Seed: VVVGAGDVG (KRAS G13D)
FVVMAVDVY

SEQ ID NO: 86058 - protein, 9 aa, synthetic construct
  source 1..9: note = Seed: VVVGAGDVG (KRAS G13D)
FVVMAWDVA

SEQ ID NO: 86059 - protein, 9 aa, synthetic construct
  source 1..9: note = Seed: VVVGAGDVG (KRAS G13D)
FVVMAWDVH

SEQ ID NO: 86060 - protein, 9 aa, synthetic construct
  source 1..9: note = Seed: VVVGAGDVG (KRAS G13D)
FVVMAWDVN

SEQ ID NO: 86061 - protein, 9 aa, synthetic construct
  source 1..9: note = Seed: VVVGAGDVG (KRAS G13D)
FVVMAWDVS

SEQ ID NO: 86062 - protein, 9 aa, synthetic construct
  source 1..9: note = Seed: VVVGAGDVG (KRAS G13D)
FVVMAYDVA

SEQ ID NO: 86063 - protein, 9 aa, synthetic construct
  source 1..9: note = Seed: VVVGAGDVG (KRAS G13D)
FVVMAYDVH

SEQ ID NO: 86064 - protein, 9 aa, synthetic construct
  source 1..9: note = Seed: VVVGAGDVG (KRAS G13D)
FVVMAYDVK

SEQ ID NO: 86065 - protein, 9 aa, synthetic construct
  source 1..9: note = Seed: VVVGAGDVG (KRAS G13D)
FVVMAYDVM

SEQ ID NO: 86066 - protein, 9 aa, synthetic construct
  source 1..9: note = Seed: VVVGAGDVG (KRAS G13D)
FVVMAYDVN

SEQ ID NO: 86067 - protein, 9 aa, synthetic construct
  source 1..9: note = Seed: VVVGAGDVG (KRAS G13D)
FVVMAYDVP

SEQ ID NO: 86068 - protein, 9 aa, synthetic construct
  source 1..9: note = Seed: VVVGAGDVG (KRAS G13D)
FVVMAYDVQ

SEQ ID NO: 86069 - protein, 9 aa, synthetic construct
  source 1..9: note = Seed: VVVGAGDVG (KRAS G13D)
FVVMAYDVR

SEQ ID NO: 86070 - protein, 9 aa, synthetic construct
  source 1..9: note = Seed: VVVGAGDVG (KRAS G13D)
FVVMAYDVS

SEQ ID NO: 86071 - protein, 9 aa, synthetic construct
  source 1..9: note = Seed: VVVGAGDVG (KRAS G13D)
FVVMAYDVT

SEQ ID NO: 86072 - protein, 9 aa, synthetic construct
  source 1..9: note = Seed: VVVGAGDVG (KRAS G13D)
FVVMAYDVV

SEQ ID NO: 86073 - protein, 9 aa, synthetic construct
  source 1..9: note = Seed: VVVGAGDVG (KRAS G13D)
FVVNAADVA

SEQ ID NO: 86074 - protein, 9 aa, synthetic construct
  source 1..9: note = Seed: VVVGAGDVG (KRAS G13D)
FVVNAADVC

SEQ ID NO: 86075 - protein, 9 aa, synthetic construct
  source 1..9: note = Seed: VVVGAGDVG (KRAS G13D)
FVVNAADVD

SEQ ID NO: 86076 - protein, 9 aa, synthetic construct
  source 1..9: note = Seed: VVVGAGDVG (KRAS G13D)
FVVNAADVE

SEQ ID NO: 86077 - protein, 9 aa, synthetic construct
  source 1..9: note = Seed: VVVGAGDVG (KRAS G13D)
FVVNAADVF

SEQ ID NO: 86078 - protein, 9 aa, synthetic construct
  source 1..9: note = Seed: VVVGAGDVG (KRAS G13D)
FVVNAADVG

SEQ ID NO: 86079 - protein, 9 aa, synthetic construct
  source 1..9: note = Seed: VVVGAGDVG (KRAS G13D)
FVVNAADVH

SEQ ID NO: 86080 - protein, 9 aa, synthetic construct
  source 1..9: note = Seed: VVVGAGDVG (KRAS G13D)
FVVNAADVI

SEQ ID NO: 86081 - protein, 9 aa, synthetic construct
  source 1..9: note = Seed: VVVGAGDVG (KRAS G13D)
FVVNAADVK

SEQ ID NO: 86082 - protein, 9 aa, synthetic construct
  source 1..9: note = Seed: VVVGAGDVG (KRAS G13D)
FVVNAADVL

SEQ ID NO: 86083 - protein, 9 aa, synthetic construct
  source 1..9: note = Seed: VVVGAGDVG (KRAS G13D)
FVVNAADVM

SEQ ID NO: 86084 - protein, 9 aa, synthetic construct
  source 1..9: note = Seed: VVVGAGDVG (KRAS G13D)
FVVNAADVN

SEQ ID NO: 86085 - protein, 9 aa, synthetic construct
  source 1..9: note = Seed: VVVGAGDVG (KRAS G13D)
FVVNAADVP

SEQ ID NO: 86086 - protein, 9 aa, synthetic construct
  source 1..9: note = Seed: VVVGAGDVG (KRAS G13D)
FVVNAADVQ

SEQ ID NO: 86087 - protein, 9 aa, synthetic construct
  source 1..9: note = Seed: VVVGAGDVG (KRAS G13D)
FVVNAADVR

SEQ ID NO: 86088 - protein, 9 aa, synthetic construct
  source 1..9: note = Seed: VVVGAGDVG (KRAS G13D)
FVVNAADVS

SEQ ID NO: 86089 - protein, 9 aa, synthetic construct
  source 1..9: note = Seed: VVVGAGDVG (KRAS G13D)
FVVNAADVT

SEQ ID NO: 86090 - protein, 9 aa, synthetic construct
  source 1..9: note = Seed: VVVGAGDVG (KRAS G13D)
FVVNAADVV

SEQ ID NO: 86091 - protein, 9 aa, synthetic construct
  source 1..9: note = Seed: VVVGAGDVG (KRAS G13D)
FVVNAADVW

SEQ ID NO: 86092 - protein, 9 aa, synthetic construct
  source 1..9: note = Seed: VVVGAGDVG (KRAS G13D)
FVVNAADVY

SEQ ID NO: 86093 - protein, 9 aa, synthetic construct
  source 1..9: note = Seed: VVVGAGDVG (KRAS G13D)
FVVNADDVA

SEQ ID NO: 86094 - protein, 9 aa, synthetic construct
  source 1..9: note = Seed: VVVGAGDVG (KRAS G13D)
FVVNADDVF

SEQ ID NO: 86095 - protein, 9 aa, synthetic construct
  source 1..9: note = Seed: VVVGAGDVG (KRAS G13D)
FVVNADDVI

SEQ ID NO: 86096 - protein, 9 aa, synthetic construct
  source 1..9: note = Seed: VVVGAGDVG (KRAS G13D)
FVVNADDVL

SEQ ID NO: 86097 - protein, 9 aa, synthetic construct
  source 1..9: note = Seed: VVVGAGDVG (KRAS G13D)
FVVNADDVM

SEQ ID NO: 86098 - protein, 9 aa, synthetic construct
  source 1..9: note = Seed: VVVGAGDVG (KRAS G13D)
FVVNADDVS

SEQ ID NO: 86099 - protein, 9 aa, synthetic construct
  source 1..9: note = Seed: VVVGAGDVG (KRAS G13D)
FVVNADDVV

SEQ ID NO: 86100 - protein, 9 aa, synthetic construct
  source 1..9: note = Seed: VVVGAGDVG (KRAS G13D)
FVVNADDVY

SEQ ID NO: 86101 - protein, 9 aa, synthetic construct
  source 1..9: note = Seed: VVVGAGDVG (KRAS G13D)
FVVNAEDVA

SEQ ID NO: 86102 - protein, 9 aa, synthetic construct
  source 1..9: note = Seed: VVVGAGDVG (KRAS G13D)
FVVNAGDVA

SEQ ID NO: 86103 - protein, 9 aa, synthetic construct
  source 1..9: note = Seed: VVVGAGDVG (KRAS G13D)
FVVNAGDVL

SEQ ID NO: 86104 - protein, 9 aa, synthetic construct
  source 1..9: note = Seed: VVVGAGDVG (KRAS G13D)
FVVNAGDVN

SEQ ID NO: 86105 - protein, 9 aa, synthetic construct
  source 1..9: note = Seed: VVVGAGDVG (KRAS G13D)
FVVNAGDVS

SEQ ID NO: 86106 - protein, 9 aa, synthetic construct
  source 1..9: note = Seed: VVVGAGDVG (KRAS G13D)
FVVNAGDVV

SEQ ID NO: 86107 - protein, 9 aa, synthetic construct
  source 1..9: note = Seed: VVVGAGDVG (KRAS G13D)
FVVNAHDVA

SEQ ID NO: 86108 - protein, 9 aa, synthetic construct
  source 1..9: note = Seed: VVVGAGDVG (KRAS G13D)
FVVNAHDVS

SEQ ID NO: 86109 - protein, 9 aa, synthetic construct
  source 1..9: note = Seed: VVVGAGDVG (KRAS G13D)
FVVNAIDVA

SEQ ID NO: 86110 - protein, 9 aa, synthetic construct
  source 1..9: note = Seed: VVVGAGDVG (KRAS G13D)
FVVNAIDVE

SEQ ID NO: 86111 - protein, 9 aa, synthetic construct
  source 1..9: note = Seed: VVVGAGDVG (KRAS G13D)
FVVNAIDVG

SEQ ID NO: 86112 - protein, 9 aa, synthetic construct
  source 1..9: note = Seed: VVVGAGDVG (KRAS G13D)
FVVNAIDVH

SEQ ID NO: 86113 - protein, 9 aa, synthetic construct
  source 1..9: note = Seed: VVVGAGDVG (KRAS G13D)
FVVNAIDVI

SEQ ID NO: 86114 - protein, 9 aa, synthetic construct
  source 1..9: note = Seed: VVVGAGDVG (KRAS G13D)
FVVNAIDVL

SEQ ID NO: 86115 - protein, 9 aa, synthetic construct
  source 1..9: note = Seed: VVVGAGDVG (KRAS G13D)
FVVNAIDVM

SEQ ID NO: 86116 - protein, 9 aa, synthetic construct
  source 1..9: note = Seed: VVVGAGDVG (KRAS G13D)
FVVNAIDVN

SEQ ID NO: 86117 - protein, 9 aa, synthetic construct
  source 1..9: note = Seed: VVVGAGDVG (KRAS G13D)
FVVNAIDVQ

SEQ ID NO: 86118 - protein, 9 aa, synthetic construct
  source 1..9: note = Seed: VVVGAGDVG (KRAS G13D)
FVVNAIDVS

SEQ ID NO: 86119 - protein, 9 aa, synthetic construct
  source 1..9: note = Seed: VVVGAGDVG (KRAS G13D)
FVVNAIDVT

SEQ ID NO: 86120 - protein, 9 aa, synthetic construct
  source 1..9: note = Seed: VVVGAGDVG (KRAS G13D)
FVVNAIDVV

SEQ ID NO: 86121 - protein, 9 aa, synthetic construct
  source 1..9: note = Seed: VVVGAGDVG (KRAS G13D)
FVVNALDVA

SEQ ID NO: 86122 - protein, 9 aa, synthetic construct
  source 1..9: note = Seed: VVVGAGDVG (KRAS G13D)
FVVNALDVC

SEQ ID NO: 86123 - protein, 9 aa, synthetic construct
  source 1..9: note = Seed: VVVGAGDVG (KRAS G13D)
FVVNALDVG

SEQ ID NO: 86124 - protein, 9 aa, synthetic construct
  source 1..9: note = Seed: VVVGAGDVG (KRAS G13D)
FVVNALDVI

SEQ ID NO: 86125 - protein, 9 aa, synthetic construct
  source 1..9: note = Seed: VVVGAGDVG (KRAS G13D)
FVVNALDVL

SEQ ID NO: 86126 - protein, 9 aa, synthetic construct
  source 1..9: note = Seed: VVVGAGDVG (KRAS G13D)
FVVNALDVM

SEQ ID NO: 86127 - protein, 9 aa, synthetic construct
  source 1..9: note = Seed: VVVGAGDVG (KRAS G13D)
FVVNALDVS

SEQ ID NO: 86128 - protein, 9 aa, synthetic construct
  source 1..9: note = Seed: VVVGAGDVG (KRAS G13D)
FVVNALDVV

SEQ ID NO: 86129 - protein, 9 aa, synthetic construct
  source 1..9: note = Seed: VVVGAGDVG (KRAS G13D)
FVVNAMDVG

SEQ ID NO: 86130 - protein, 9 aa, synthetic construct
  source 1..9: note = Seed: VVVGAGDVG (KRAS G13D)
FVVNANDVA

SEQ ID NO: 86131 - protein, 9 aa, synthetic construct
  source 1..9: note = Seed: VVVGAGDVG (KRAS G13D)
FVVNANDVC

SEQ ID NO: 86132 - protein, 9 aa, synthetic construct
  source 1..9: note = Seed: VVVGAGDVG (KRAS G13D)
FVVNANDVD

SEQ ID NO: 86133 - protein, 9 aa, synthetic construct
  source 1..9: note = Seed: VVVGAGDVG (KRAS G13D)
FVVNANDVE

SEQ ID NO: 86134 - protein, 9 aa, synthetic construct
  source 1..9: note = Seed: VVVGAGDVG (KRAS G13D)
FVVNANDVF

SEQ ID NO: 86135 - protein, 9 aa, synthetic construct
  source 1..9: note = Seed: VVVGAGDVG (KRAS G13D)
FVVNANDVG

SEQ ID NO: 86136 - protein, 9 aa, synthetic construct
  source 1..9: note = Seed: VVVGAGDVG (KRAS G13D)
FVVNANDVH

SEQ ID NO: 86137 - protein, 9 aa, synthetic construct
  source 1..9: note = Seed: VVVGAGDVG (KRAS G13D)
FVVNANDVI

SEQ ID NO: 86138 - protein, 9 aa, synthetic construct
  source 1..9: note = Seed: VVVGAGDVG (KRAS G13D)
FVVNANDVK

SEQ ID NO: 86139 - protein, 9 aa, synthetic construct
  source 1..9: note = Seed: VVVGAGDVG (KRAS G13D)
FVVNANDVL

SEQ ID NO: 86140 - protein, 9 aa, synthetic construct
  source 1..9: note = Seed: VVVGAGDVG (KRAS G13D)
FVVNANDVM

SEQ ID NO: 86141 - protein, 9 aa, synthetic construct
  source 1..9: note = Seed: VVVGAGDVG (KRAS G13D)
FVVNANDVN

SEQ ID NO: 86142 - protein, 9 aa, synthetic construct
  source 1..9: note = Seed: VVVGAGDVG (KRAS G13D)
FVVNANDVP

SEQ ID NO: 86143 - protein, 9 aa, synthetic construct
  source 1..9: note = Seed: VVVGAGDVG (KRAS G13D)
FVVNANDVQ

SEQ ID NO: 86144 - protein, 9 aa, synthetic construct
  source 1..9: note = Seed: VVVGAGDVG (KRAS G13D)
FVVNANDVR

SEQ ID NO: 86145 - protein, 9 aa, synthetic construct
  source 1..9: note = Seed: VVVGAGDVG (KRAS G13D)
FVVNANDVS

SEQ ID NO: 86146 - protein, 9 aa, synthetic construct
  source 1..9: note = Seed: VVVGAGDVG (KRAS G13D)
FVVNANDVT

SEQ ID NO: 86147 - protein, 9 aa, synthetic construct
  source 1..9: note = Seed: VVVGAGDVG (KRAS G13D)
FVVNANDVV

SEQ ID NO: 86148 - protein, 9 aa, synthetic construct
  source 1..9: note = Seed: VVVGAGDVG (KRAS G13D)
FVVNANDVY

SEQ ID NO: 86149 - protein, 9 aa, synthetic construct
  source 1..9: note = Seed: VVVGAGDVG (KRAS G13D)
FVVNAPDVA

SEQ ID NO: 86150 - protein, 9 aa, synthetic construct
  source 1..9: note = Seed: VVVGAGDVG (KRAS G13D)
FVVNAPDVG

SEQ ID NO: 86151 - protein, 9 aa, synthetic construct
  source 1..9: note = Seed: VVVGAGDVG (KRAS G13D)
FVVNAPDVH

SEQ ID NO: 86152 - protein, 9 aa, synthetic construct
  source 1..9: note = Seed: VVVGAGDVG (KRAS G13D)
FVVNAPDVI

SEQ ID NO: 86153 - protein, 9 aa, synthetic construct
  source 1..9: note = Seed: VVVGAGDVG (KRAS G13D)
FVVNAPDVL

SEQ ID NO: 86154 - protein, 9 aa, synthetic construct
  source 1..9: note = Seed: VVVGAGDVG (KRAS G13D)
FVVNAPDVM

SEQ ID NO: 86155 - protein, 9 aa, synthetic construct
  source 1..9: note = Seed: VVVGAGDVG (KRAS G13D)
FVVNAPDVN

SEQ ID NO: 86156 - protein, 9 aa, synthetic construct
  source 1..9: note = Seed: VVVGAGDVG (KRAS G13D)
FVVNAPDVQ

SEQ ID NO: 86157 - protein, 9 aa, synthetic construct
  source 1..9: note = Seed: VVVGAGDVG (KRAS G13D)
FVVNAPDVS

SEQ ID NO: 86158 - protein, 9 aa, synthetic construct
  source 1..9: note = Seed: VVVGAGDVG (KRAS G13D)
FVVNAPDVT

SEQ ID NO: 86159 - protein, 9 aa, synthetic construct
  source 1..9: note = Seed: VVVGAGDVG (KRAS G13D)
FVVNAPDVV

SEQ ID NO: 86160 - protein, 9 aa, synthetic construct
  source 1..9: note = Seed: VVVGAGDVG (KRAS G13D)
FVVNAQDVA

SEQ ID NO: 86161 - protein, 9 aa, synthetic construct
  source 1..9: note = Seed: VVVGAGDVG (KRAS G13D)
FVVNAQDVS

SEQ ID NO: 86162 - protein, 9 aa, synthetic construct
  source 1..9: note = Seed: VVVGAGDVG (KRAS G13D)
FVVNASDVA

SEQ ID NO: 86163 - protein, 9 aa, synthetic construct
  source 1..9: note = Seed: VVVGAGDVG (KRAS G13D)
FVVNASDVD

SEQ ID NO: 86164 - protein, 9 aa, synthetic construct
  source 1..9: note = Seed: VVVGAGDVG (KRAS G13D)
FVVNASDVE

SEQ ID NO: 86165 - protein, 9 aa, synthetic construct
  source 1..9: note = Seed: VVVGAGDVG (KRAS G13D)
FVVNASDVF

SEQ ID NO: 86166 - protein, 9 aa, synthetic construct
  source 1..9: note = Seed: VVVGAGDVG (KRAS G13D)
FVVNASDVG

SEQ ID NO: 86167 - protein, 9 aa, synthetic construct
  source 1..9: note = Seed: VVVGAGDVG (KRAS G13D)
FVVNASDVH

SEQ ID NO: 86168 - protein, 9 aa, synthetic construct
  source 1..9: note = Seed: VVVGAGDVG (KRAS G13D)
FVVNASDVI

SEQ ID NO: 86169 - protein, 9 aa, synthetic construct
  source 1..9: note = Seed: VVVGAGDVG (KRAS G13D)
FVVNASDVK

SEQ ID NO: 86170 - protein, 9 aa, synthetic construct
  source 1..9: note = Seed: VVVGAGDVG (KRAS G13D)
FVVNASDVL

SEQ ID NO: 86171 - protein, 9 aa, synthetic construct
  source 1..9: note = Seed: VVVGAGDVG (KRAS G13D)
FVVNASDVM

SEQ ID NO: 86172 - protein, 9 aa, synthetic construct
  source 1..9: note = Seed: VVVGAGDVG (KRAS G13D)
FVVNASDVN

SEQ ID NO: 86173 - protein, 9 aa, synthetic construct
  source 1..9: note = Seed: VVVGAGDVG (KRAS G13D)
FVVNASDVP

SEQ ID NO: 86174 - protein, 9 aa, synthetic construct
  source 1..9: note = Seed: VVVGAGDVG (KRAS G13D)
FVVNASDVQ

SEQ ID NO: 86175 - protein, 9 aa, synthetic construct
  source 1..9: note = Seed: VVVGAGDVG (KRAS G13D)
FVVNASDVR

SEQ ID NO: 86176 - protein, 9 aa, synthetic construct
  source 1..9: note = Seed: VVVGAGDVG (KRAS G13D)
FVVNASDVS

SEQ ID NO: 86177 - protein, 9 aa, synthetic construct
  source 1..9: note = Seed: VVVGAGDVG (KRAS G13D)
FVVNASDVT

SEQ ID NO: 86178 - protein, 9 aa, synthetic construct
  source 1..9: note = Seed: VVVGAGDVG (KRAS G13D)
FVVNASDVV

SEQ ID NO: 86179 - protein, 9 aa, synthetic construct
  source 1..9: note = Seed: VVVGAGDVG (KRAS G13D)
FVVNASDVW

SEQ ID NO: 86180 - protein, 9 aa, synthetic construct
  source 1..9: note = Seed: VVVGAGDVG (KRAS G13D)
FVVNASDVY

SEQ ID NO: 86181 - protein, 9 aa, synthetic construct
  source 1..9: note = Seed: VVVGAGDVG (KRAS G13D)
FVVNATDVA

SEQ ID NO: 86182 - protein, 9 aa, synthetic construct
  source 1..9: note = Seed: VVVGAGDVG (KRAS G13D)
FVVNATDVF

SEQ ID NO: 86183 - protein, 9 aa, synthetic construct
  source 1..9: note = Seed: VVVGAGDVG (KRAS G13D)
FVVNATDVG

SEQ ID NO: 86184 - protein, 9 aa, synthetic construct
  source 1..9: note = Seed: VVVGAGDVG (KRAS G13D)
FVVNATDVH

SEQ ID NO: 86185 - protein, 9 aa, synthetic construct
  source 1..9: note = Seed: VVVGAGDVG (KRAS G13D)
FVVNATDVI

SEQ ID NO: 86186 - protein, 9 aa, synthetic construct
  source 1..9: note = Seed: VVVGAGDVG (KRAS G13D)
FVVNATDVK

SEQ ID NO: 86187 - protein, 9 aa, synthetic construct
  source 1..9: note = Seed: VVVGAGDVG (KRAS G13D)
FVVNATDVL

SEQ ID NO: 86188 - protein, 9 aa, synthetic construct
  source 1..9: note = Seed: VVVGAGDVG (KRAS G13D)
FVVNATDVM

SEQ ID NO: 86189 - protein, 9 aa, synthetic construct
  source 1..9: note = Seed: VVVGAGDVG (KRAS G13D)
FVVNATDVN

SEQ ID NO: 86190 - protein, 9 aa, synthetic construct
  source 1..9: note = Seed: VVVGAGDVG (KRAS G13D)
FVVNATDVP

SEQ ID NO: 86191 - protein, 9 aa, synthetic construct
  source 1..9: note = Seed: VVVGAGDVG (KRAS G13D)
FVVNATDVQ

SEQ ID NO: 86192 - protein, 9 aa, synthetic construct
  source 1..9: note = Seed: VVVGAGDVG (KRAS G13D)
FVVNATDVR

SEQ ID NO: 86193 - protein, 9 aa, synthetic construct
  source 1..9: note = Seed: VVVGAGDVG (KRAS G13D)
FVVNATDVS

SEQ ID NO: 86194 - protein, 9 aa, synthetic construct
  source 1..9: note = Seed: VVVGAGDVG (KRAS G13D)
FVVNATDVT

SEQ ID NO: 86195 - protein, 9 aa, synthetic construct
  source 1..9: note = Seed: VVVGAGDVG (KRAS G13D)
FVVNATDVV

SEQ ID NO: 86196 - protein, 9 aa, synthetic construct
  source 1..9: note = Seed: VVVGAGDVG (KRAS G13D)
FVVNATDVY

SEQ ID NO: 86197 - protein, 9 aa, synthetic construct
  source 1..9: note = Seed: VVVGAGDVG (KRAS G13D)
FVVNAVDVA

SEQ ID NO: 86198 - protein, 9 aa, synthetic construct
  source 1..9: note = Seed: VVVGAGDVG (KRAS G13D)
FVVNAVDVE

SEQ ID NO: 86199 - protein, 9 aa, synthetic construct
  source 1..9: note = Seed: VVVGAGDVG (KRAS G13D)
FVVNAVDVF

SEQ ID NO: 86200 - protein, 9 aa, synthetic construct
  source 1..9: note = Seed: VVVGAGDVG (KRAS G13D)
FVVNAVDVG

SEQ ID NO: 86201 - protein, 9 aa, synthetic construct
  source 1..9: note = Seed: VVVGAGDVG (KRAS G13D)
FVVNAVDVH

SEQ ID NO: 86202 - protein, 9 aa, synthetic construct
  source 1..9: note = Seed: VVVGAGDVG (KRAS G13D)
FVVNAVDVI

SEQ ID NO: 86203 - protein, 9 aa, synthetic construct
  source 1..9: note = Seed: VVVGAGDVG (KRAS G13D)
FVVNAVDVK

SEQ ID NO: 86204 - protein, 9 aa, synthetic construct
  source 1..9: note = Seed: VVVGAGDVG (KRAS G13D)
FVVNAVDVL

SEQ ID NO: 86205 - protein, 9 aa, synthetic construct
  source 1..9: note = Seed: VVVGAGDVG (KRAS G13D)
FVVNAVDVM

SEQ ID NO: 86206 - protein, 9 aa, synthetic construct
  source 1..9: note = Seed: VVVGAGDVG (KRAS G13D)
FVVNAVDVN

SEQ ID NO: 86207 - protein, 9 aa, synthetic construct
  source 1..9: note = Seed: VVVGAGDVG (KRAS G13D)
FVVNAVDVP

SEQ ID NO: 86208 - protein, 9 aa, synthetic construct
  source 1..9: note = Seed: VVVGAGDVG (KRAS G13D)
FVVNAVDVQ

SEQ ID NO: 86209 - protein, 9 aa, synthetic construct
  source 1..9: note = Seed: VVVGAGDVG (KRAS G13D)
FVVNAVDVR

SEQ ID NO: 86210 - protein, 9 aa, synthetic construct
  source 1..9: note = Seed: VVVGAGDVG (KRAS G13D)
FVVNAVDVS

SEQ ID NO: 86211 - protein, 9 aa, synthetic construct
  source 1..9: note = Seed: VVVGAGDVG (KRAS G13D)
FVVNAVDVT

SEQ ID NO: 86212 - protein, 9 aa, synthetic construct
  source 1..9: note = Seed: VVVGAGDVG (KRAS G13D)
FVVNAVDVV

SEQ ID NO: 86213 - protein, 9 aa, synthetic construct
  source 1..9: note = Seed: VVVGAGDVG (KRAS G13D)
FVVNAVDVY

SEQ ID NO: 86214 - protein, 9 aa, synthetic construct
  source 1..9: note = Seed: VVVGAGDVG (KRAS G13D)
FVVPAADVA

SEQ ID NO: 86215 - protein, 9 aa, synthetic construct
  source 1..9: note = Seed: VVVGAGDVG (KRAS G13D)
FVVPAADVC

SEQ ID NO: 86216 - protein, 9 aa, synthetic construct
  source 1..9: note = Seed: VVVGAGDVG (KRAS G13D)
FVVPAADVG

SEQ ID NO: 86217 - protein, 9 aa, synthetic construct
  source 1..9: note = Seed: VVVGAGDVG (KRAS G13D)
FVVPAADVI

SEQ ID NO: 86218 - protein, 9 aa, synthetic construct
  source 1..9: note = Seed: VVVGAGDVG (KRAS G13D)
FVVPAADVL

SEQ ID NO: 86219 - protein, 9 aa, synthetic construct
  source 1..9: note = Seed: VVVGAGDVG (KRAS G13D)
FVVPAADVM

SEQ ID NO: 86220 - protein, 9 aa, synthetic construct
  source 1..9: note = Seed: VVVGAGDVG (KRAS G13D)
FVVPAADVN

SEQ ID NO: 86221 - protein, 9 aa, synthetic construct
  source 1..9: note = Seed: VVVGAGDVG (KRAS G13D)
FVVPAADVQ

SEQ ID NO: 86222 - protein, 9 aa, synthetic construct
  source 1..9: note = Seed: VVVGAGDVG (KRAS G13D)
FVVPAADVS

SEQ ID NO: 86223 - protein, 9 aa, synthetic construct
  source 1..9: note = Seed: VVVGAGDVG (KRAS G13D)
FVVPAADVT

SEQ ID NO: 86224 - protein, 9 aa, synthetic construct
  source 1..9: note = Seed: VVVGAGDVG (KRAS G13D)
FVVPAADVV

SEQ ID NO: 86225 - protein, 9 aa, synthetic construct
  source 1..9: note = Seed: VVVGAGDVG (KRAS G13D)
FVVPACDVA

SEQ ID NO: 86226 - protein, 9 aa, synthetic construct
  source 1..9: note = Seed: VVVGAGDVG (KRAS G13D)
FVVPACDVI

SEQ ID NO: 86227 - protein, 9 aa, synthetic construct
  source 1..9: note = Seed: VVVGAGDVG (KRAS G13D)
FVVPACDVL

SEQ ID NO: 86228 - protein, 9 aa, synthetic construct
  source 1..9: note = Seed: VVVGAGDVG (KRAS G13D)
FVVPACDVV

SEQ ID NO: 86229 - protein, 9 aa, synthetic construct
  source 1..9: note = Seed: VVVGAGDVG (KRAS G13D)
FVVPAFDVM

SEQ ID NO: 86230 - protein, 9 aa, synthetic construct
  source 1..9: note = Seed: VVVGAGDVG (KRAS G13D)
FVVPAGDVA

SEQ ID NO: 86231 - protein, 9 aa, synthetic construct
  source 1..9: note = Seed: VVVGAGDVG (KRAS G13D)
FVVPAGDVI

SEQ ID NO: 86232 - protein, 9 aa, synthetic construct
  source 1..9: note = Seed: VVVGAGDVG (KRAS G13D)
FVVPAGDVL

SEQ ID NO: 86233 - protein, 9 aa, synthetic construct
  source 1..9: note = Seed: VVVGAGDVG (KRAS G13D)
FVVPAGDVM

SEQ ID NO: 86234 - protein, 9 aa, synthetic construct
  source 1..9: note = Seed: VVVGAGDVG (KRAS G13D)
FVVPAGDVV

SEQ ID NO: 86235 - protein, 9 aa, synthetic construct
  source 1..9: note = Seed: VVVGAGDVG (KRAS G13D)
FVVPAIDVA

SEQ ID NO: 86236 - protein, 9 aa, synthetic construct
  source 1..9: note = Seed: VVVGAGDVG (KRAS G13D)
FVVPAIDVT

SEQ ID NO: 86237 - protein, 9 aa, synthetic construct
  source 1..9: note = Seed: VVVGAGDVG (KRAS G13D)
FVVPALDVA

SEQ ID NO: 86238 - protein, 9 aa, synthetic construct
  source 1..9: note = Seed: VVVGAGDVG (KRAS G13D)
FVVPALDVT

SEQ ID NO: 86239 - protein, 9 aa, synthetic construct
  source 1..9: note = Seed: VVVGAGDVG (KRAS G13D)
FVVPAMDVA

SEQ ID NO: 86240 - protein, 9 aa, synthetic construct
  source 1..9: note = Seed: VVVGAGDVG (KRAS G13D)
FVVPANDVA

SEQ ID NO: 86241 - protein, 9 aa, synthetic construct
  source 1..9: note = Seed: VVVGAGDVG (KRAS G13D)
FVVPAPDVA

SEQ ID NO: 86242 - protein, 9 aa, synthetic construct
  source 1..9: note = Seed: VVVGAGDVG (KRAS G13D)
FVVPAPDVI

SEQ ID NO: 86243 - protein, 9 aa, synthetic construct
  source 1..9: note = Seed: VVVGAGDVG (KRAS G13D)
FVVPAPDVL

SEQ ID NO: 86244 - protein, 9 aa, synthetic construct
  source 1..9: note = Seed: VVVGAGDVG (KRAS G13D)
FVVPAPDVM

SEQ ID NO: 86245 - protein, 9 aa, synthetic construct
  source 1..9: note = Seed: VVVGAGDVG (KRAS G13D)
FVVPAPDVN

SEQ ID NO: 86246 - protein, 9 aa, synthetic construct
  source 1..9: note = Seed: VVVGAGDVG (KRAS G13D)
FVVPAPDVS

SEQ ID NO: 86247 - protein, 9 aa, synthetic construct
  source 1..9: note = Seed: VVVGAGDVG (KRAS G13D)
FVVPAPDVT

SEQ ID NO: 86248 - protein, 9 aa, synthetic construct
  source 1..9: note = Seed: VVVGAGDVG (KRAS G13D)
FVVPAPDVV

SEQ ID NO: 86249 - protein, 9 aa, synthetic construct
  source 1..9: note = Seed: VVVGAGDVG (KRAS G13D)
FVVPASDVA

SEQ ID NO: 86250 - protein, 9 aa, synthetic construct
  source 1..9: note = Seed: VVVGAGDVG (KRAS G13D)
FVVPASDVC

SEQ ID NO: 86251 - protein, 9 aa, synthetic construct
  source 1..9: note = Seed: VVVGAGDVG (KRAS G13D)
FVVPASDVG

SEQ ID NO: 86252 - protein, 9 aa, synthetic construct
  source 1..9: note = Seed: VVVGAGDVG (KRAS G13D)
FVVPASDVI

SEQ ID NO: 86253 - protein, 9 aa, synthetic construct
  source 1..9: note = Seed: VVVGAGDVG (KRAS G13D)
FVVPASDVL

SEQ ID NO: 86254 - protein, 9 aa, synthetic construct
  source 1..9: note = Seed: VVVGAGDVG (KRAS G13D)
FVVPASDVM

SEQ ID NO: 86255 - protein, 9 aa, synthetic construct
  source 1..9: note = Seed: VVVGAGDVG (KRAS G13D)
FVVPASDVN

SEQ ID NO: 86256 - protein, 9 aa, synthetic construct
  source 1..9: note = Seed: VVVGAGDVG (KRAS G13D)
FVVPASDVQ

SEQ ID NO: 86257 - protein, 9 aa, synthetic construct
  source 1..9: note = Seed: VVVGAGDVG (KRAS G13D)
FVVPASDVS

SEQ ID NO: 86258 - protein, 9 aa, synthetic construct
  source 1..9: note = Seed: VVVGAGDVG (KRAS G13D)
FVVPASDVT

SEQ ID NO: 86259 - protein, 9 aa, synthetic construct
  source 1..9: note = Seed: VVVGAGDVG (KRAS G13D)
FVVPASDVV

SEQ ID NO: 86260 - protein, 9 aa, synthetic construct
  source 1..9: note = Seed: VVVGAGDVG (KRAS G13D)
FVVPATDVA

SEQ ID NO: 86261 - protein, 9 aa, synthetic construct
  source 1..9: note = Seed: VVVGAGDVG (KRAS G13D)
FVVPATDVC

SEQ ID NO: 86262 - protein, 9 aa, synthetic construct
  source 1..9: note = Seed: VVVGAGDVG (KRAS G13D)
FVVPATDVG

SEQ ID NO: 86263 - protein, 9 aa, synthetic construct
  source 1..9: note = Seed: VVVGAGDVG (KRAS G13D)
FVVPATDVI

SEQ ID NO: 86264 - protein, 9 aa, synthetic construct
  source 1..9: note = Seed: VVVGAGDVG (KRAS G13D)
FVVPATDVL

SEQ ID NO: 86265 - protein, 9 aa, synthetic construct
  source 1..9: note = Seed: VVVGAGDVG (KRAS G13D)
FVVPATDVM

SEQ ID NO: 86266 - protein, 9 aa, synthetic construct
  source 1..9: note = Seed: VVVGAGDVG (KRAS G13D)
FVVPATDVN

SEQ ID NO: 86267 - protein, 9 aa, synthetic construct
  source 1..9: note = Seed: VVVGAGDVG (KRAS G13D)
FVVPATDVQ

SEQ ID NO: 86268 - protein, 9 aa, synthetic construct
  source 1..9: note = Seed: VVVGAGDVG (KRAS G13D)
FVVPATDVS

SEQ ID NO: 86269 - protein, 9 aa, synthetic construct
  source 1..9: note = Seed: VVVGAGDVG (KRAS G13D)
FVVPATDVT

SEQ ID NO: 86270 - protein, 9 aa, synthetic construct
  source 1..9: note = Seed: VVVGAGDVG (KRAS G13D)
FVVPATDVV

SEQ ID NO: 86271 - protein, 9 aa, synthetic construct
  source 1..9: note = Seed: VVVGAGDVG (KRAS G13D)
FVVPAVDVA

SEQ ID NO: 86272 - protein, 9 aa, synthetic construct
  source 1..9: note = Seed: VVVGAGDVG (KRAS G13D)
FVVPAVDVC

SEQ ID NO: 86273 - protein, 9 aa, synthetic construct
  source 1..9: note = Seed: VVVGAGDVG (KRAS G13D)
FVVPAVDVG

SEQ ID NO: 86274 - protein, 9 aa, synthetic construct
  source 1..9: note = Seed: VVVGAGDVG (KRAS G13D)
FVVPAVDVI

SEQ ID NO: 86275 - protein, 9 aa, synthetic construct
  source 1..9: note = Seed: VVVGAGDVG (KRAS G13D)
FVVPAVDVN

SEQ ID NO: 86276 - protein, 9 aa, synthetic construct
  source 1..9: note = Seed: VVVGAGDVG (KRAS G13D)
FVVPAVDVS

SEQ ID NO: 86277 - protein, 9 aa, synthetic construct
  source 1..9: note = Seed: VVVGAGDVG (KRAS G13D)
FVVPAVDVT

SEQ ID NO: 86278 - protein, 9 aa, synthetic construct
  source 1..9: note = Seed: VVVGAGDVG (KRAS G13D)
FVVPAVDVV

SEQ ID NO: 86279 - protein, 9 aa, synthetic construct
  source 1..9: note = Seed: VVVGAGDVG (KRAS G13D)
FVVQAADVA

SEQ ID NO: 86280 - protein, 9 aa, synthetic construct
  source 1..9: note = Seed: VVVGAGDVG (KRAS G13D)
FVVQAADVC

SEQ ID NO: 86281 - protein, 9 aa, synthetic construct
  source 1..9: note = Seed: VVVGAGDVG (KRAS G13D)
FVVQAADVD

SEQ ID NO: 86282 - protein, 9 aa, synthetic construct
  source 1..9: note = Seed: VVVGAGDVG (KRAS G13D)
FVVQAADVE

SEQ ID NO: 86283 - protein, 9 aa, synthetic construct
  source 1..9: note = Seed: VVVGAGDVG (KRAS G13D)
FVVQAADVF

SEQ ID NO: 86284 - protein, 9 aa, synthetic construct
  source 1..9: note = Seed: VVVGAGDVG (KRAS G13D)
FVVQAADVG

SEQ ID NO: 86285 - protein, 9 aa, synthetic construct
  source 1..9: note = Seed: VVVGAGDVG (KRAS G13D)
FVVQAADVH

SEQ ID NO: 86286 - protein, 9 aa, synthetic construct
  source 1..9: note = Seed: VVVGAGDVG (KRAS G13D)
FVVQAADVI

SEQ ID NO: 86287 - protein, 9 aa, synthetic construct
  source 1..9: note = Seed: VVVGAGDVG (KRAS G13D)
FVVQAADVK

SEQ ID NO: 86288 - protein, 9 aa, synthetic construct
  source 1..9: note = Seed: VVVGAGDVG (KRAS G13D)
FVVQAADVL

SEQ ID NO: 86289 - protein, 9 aa, synthetic construct
  source 1..9: note = Seed: VVVGAGDVG (KRAS G13D)
FVVQAADVM

SEQ ID NO: 86290 - protein, 9 aa, synthetic construct
  source 1..9: note = Seed: VVVGAGDVG (KRAS G13D)
FVVQAADVN

SEQ ID NO: 86291 - protein, 9 aa, synthetic construct
  source 1..9: note = Seed: VVVGAGDVG (KRAS G13D)
FVVQAADVP

SEQ ID NO: 86292 - protein, 9 aa, synthetic construct
  source 1..9: note = Seed: VVVGAGDVG (KRAS G13D)
FVVQAADVQ

SEQ ID NO: 86293 - protein, 9 aa, synthetic construct
  source 1..9: note = Seed: VVVGAGDVG (KRAS G13D)
FVVQAADVR

SEQ ID NO: 86294 - protein, 9 aa, synthetic construct
  source 1..9: note = Seed: VVVGAGDVG (KRAS G13D)
FVVQAADVS

SEQ ID NO: 86295 - protein, 9 aa, synthetic construct
  source 1..9: note = Seed: VVVGAGDVG (KRAS G13D)
FVVQAADVT

SEQ ID NO: 86296 - protein, 9 aa, synthetic construct
  source 1..9: note = Seed: VVVGAGDVG (KRAS G13D)
FVVQAADVV

SEQ ID NO: 86297 - protein, 9 aa, synthetic construct
  source 1..9: note = Seed: VVVGAGDVG (KRAS G13D)
FVVQAADVW

SEQ ID NO: 86298 - protein, 9 aa, synthetic construct
  source 1..9: note = Seed: VVVGAGDVG (KRAS G13D)
FVVQAADVY

SEQ ID NO: 86299 - protein, 9 aa, synthetic construct
  source 1..9: note = Seed: VVVGAGDVG (KRAS G13D)
FVVQACDVA

SEQ ID NO: 86300 - protein, 9 aa, synthetic construct
  source 1..9: note = Seed: VVVGAGDVG (KRAS G13D)
FVVQACDVN

SEQ ID NO: 86301 - protein, 9 aa, synthetic construct
  source 1..9: note = Seed: VVVGAGDVG (KRAS G13D)
FVVQACDVS

SEQ ID NO: 86302 - protein, 9 aa, synthetic construct
  source 1..9: note = Seed: VVVGAGDVG (KRAS G13D)
FVVQADDVA

SEQ ID NO: 86303 - protein, 9 aa, synthetic construct
  source 1..9: note = Seed: VVVGAGDVG (KRAS G13D)
FVVQADDVF

SEQ ID NO: 86304 - protein, 9 aa, synthetic construct
  source 1..9: note = Seed: VVVGAGDVG (KRAS G13D)
FVVQADDVI

SEQ ID NO: 86305 - protein, 9 aa, synthetic construct
  source 1..9: note = Seed: VVVGAGDVG (KRAS G13D)
FVVQADDVL

SEQ ID NO: 86306 - protein, 9 aa, synthetic construct
  source 1..9: note = Seed: VVVGAGDVG (KRAS G13D)
FVVQADDVM

SEQ ID NO: 86307 - protein, 9 aa, synthetic construct
  source 1..9: note = Seed: VVVGAGDVG (KRAS G13D)
FVVQADDVN

SEQ ID NO: 86308 - protein, 9 aa, synthetic construct
  source 1..9: note = Seed: VVVGAGDVG (KRAS G13D)
FVVQADDVS

SEQ ID NO: 86309 - protein, 9 aa, synthetic construct
  source 1..9: note = Seed: VVVGAGDVG (KRAS G13D)
FVVQADDVT

SEQ ID NO: 86310 - protein, 9 aa, synthetic construct
  source 1..9: note = Seed: VVVGAGDVG (KRAS G13D)
FVVQADDVV

SEQ ID NO: 86311 - protein, 9 aa, synthetic construct
  source 1..9: note = Seed: VVVGAGDVG (KRAS G13D)
FVVQAEDVA

SEQ ID NO: 86312 - protein, 9 aa, synthetic construct
  source 1..9: note = Seed: VVVGAGDVG (KRAS G13D)
FVVQAEDVF

SEQ ID NO: 86313 - protein, 9 aa, synthetic construct
  source 1..9: note = Seed: VVVGAGDVG (KRAS G13D)
FVVQAEDVG

SEQ ID NO: 86314 - protein, 9 aa, synthetic construct
  source 1..9: note = Seed: VVVGAGDVG (KRAS G13D)
FVVQAEDVH

SEQ ID NO: 86315 - protein, 9 aa, synthetic construct
  source 1..9: note = Seed: VVVGAGDVG (KRAS G13D)
FVVQAEDVI

SEQ ID NO: 86316 - protein, 9 aa, synthetic construct
  source 1..9: note = Seed: VVVGAGDVG (KRAS G13D)
FVVQAEDVL

SEQ ID NO: 86317 - protein, 9 aa, synthetic construct
  source 1..9: note = Seed: VVVGAGDVG (KRAS G13D)
FVVQAEDVM

SEQ ID NO: 86318 - protein, 9 aa, synthetic construct
  source 1..9: note = Seed: VVVGAGDVG (KRAS G13D)
FVVQAEDVN

SEQ ID NO: 86319 - protein, 9 aa, synthetic construct
  source 1..9: note = Seed: VVVGAGDVG (KRAS G13D)
FVVQAEDVQ

SEQ ID NO: 86320 - protein, 9 aa, synthetic construct
  source 1..9: note = Seed: VVVGAGDVG (KRAS G13D)
FVVQAEDVS

SEQ ID NO: 86321 - protein, 9 aa, synthetic construct
  source 1..9: note = Seed: VVVGAGDVG (KRAS G13D)
FVVQAEDVT

SEQ ID NO: 86322 - protein, 9 aa, synthetic construct
  source 1..9: note = Seed: VVVGAGDVG (KRAS G13D)
FVVQAEDVV

SEQ ID NO: 86323 - protein, 9 aa, synthetic construct
  source 1..9: note = Seed: VVVGAGDVG (KRAS G13D)
FVVQAEDVY

SEQ ID NO: 86324 - protein, 9 aa, synthetic construct
  source 1..9: note = Seed: VVVGAGDVG (KRAS G13D)
FVVQAFDVA

SEQ ID NO: 86325 - protein, 9 aa, synthetic construct
  source 1..9: note = Seed: VVVGAGDVG (KRAS G13D)
FVVQAFDVM

SEQ ID NO: 86326 - protein, 9 aa, synthetic construct
  source 1..9: note = Seed: VVVGAGDVG (KRAS G13D)
FVVQAFDVN

SEQ ID NO: 86327 - protein, 9 aa, synthetic construct
  source 1..9: note = Seed: VVVGAGDVG (KRAS G13D)
FVVQAFDVS

SEQ ID NO: 86328 - protein, 9 aa, synthetic construct
  source 1..9: note = Seed: VVVGAGDVG (KRAS G13D)
FVVQAFDVT

SEQ ID NO: 86329 - protein, 9 aa, synthetic construct
  source 1..9: note = Seed: VVVGAGDVG (KRAS G13D)
FVVQAGDVA

SEQ ID NO: 86330 - protein, 9 aa, synthetic construct
  source 1..9: note = Seed: VVVGAGDVG (KRAS G13D)
FVVQAGDVE

SEQ ID NO: 86331 - protein, 9 aa, synthetic construct
  source 1..9: note = Seed: VVVGAGDVG (KRAS G13D)
FVVQAGDVF

SEQ ID NO: 86332 - protein, 9 aa, synthetic construct
  source 1..9: note = Seed: VVVGAGDVG (KRAS G13D)
FVVQAGDVG

SEQ ID NO: 86333 - protein, 9 aa, synthetic construct
  source 1..9: note = Seed: VVVGAGDVG (KRAS G13D)
FVVQAGDVH

SEQ ID NO: 86334 - protein, 9 aa, synthetic construct
  source 1..9: note = Seed: VVVGAGDVG (KRAS G13D)
FVVQAGDVI

SEQ ID NO: 86335 - protein, 9 aa, synthetic construct
  source 1..9: note = Seed: VVVGAGDVG (KRAS G13D)
FVVQAGDVK

SEQ ID NO: 86336 - protein, 9 aa, synthetic construct
  source 1..9: note = Seed: VVVGAGDVG (KRAS G13D)
FVVQAGDVL

SEQ ID NO: 86337 - protein, 9 aa, synthetic construct
  source 1..9: note = Seed: VVVGAGDVG (KRAS G13D)
FVVQAGDVM

SEQ ID NO: 86338 - protein, 9 aa, synthetic construct
  source 1..9: note = Seed: VVVGAGDVG (KRAS G13D)
FVVQAGDVN

SEQ ID NO: 86339 - protein, 9 aa, synthetic construct
  source 1..9: note = Seed: VVVGAGDVG (KRAS G13D)
FVVQAGDVP

SEQ ID NO: 86340 - protein, 9 aa, synthetic construct
  source 1..9: note = Seed: VVVGAGDVG (KRAS G13D)
FVVQAGDVQ

SEQ ID NO: 86341 - protein, 9 aa, synthetic construct
  source 1..9: note = Seed: VVVGAGDVG (KRAS G13D)
FVVQAGDVR

SEQ ID NO: 86342 - protein, 9 aa, synthetic construct
  source 1..9: note = Seed: VVVGAGDVG (KRAS G13D)
FVVQAGDVS

SEQ ID NO: 86343 - protein, 9 aa, synthetic construct
  source 1..9: note = Seed: VVVGAGDVG (KRAS G13D)
FVVQAGDVT

SEQ ID NO: 86344 - protein, 9 aa, synthetic construct
  source 1..9: note = Seed: VVVGAGDVG (KRAS G13D)
FVVQAGDVV

SEQ ID NO: 86345 - protein, 9 aa, synthetic construct
  source 1..9: note = Seed: VVVGAGDVG (KRAS G13D)
FVVQAGDVW

SEQ ID NO: 86346 - protein, 9 aa, synthetic construct
  source 1..9: note = Seed: VVVGAGDVG (KRAS G13D)
FVVQAGDVY

SEQ ID NO: 86347 - protein, 9 aa, synthetic construct
  source 1..9: note = Seed: VVVGAGDVG (KRAS G13D)
FVVQAHDVA

SEQ ID NO: 86348 - protein, 9 aa, synthetic construct
  source 1..9: note = Seed: VVVGAGDVG (KRAS G13D)
FVVQAHDVC

SEQ ID NO: 86349 - protein, 9 aa, synthetic construct
  source 1..9: note = Seed: VVVGAGDVG (KRAS G13D)
FVVQAHDVD

SEQ ID NO: 86350 - protein, 9 aa, synthetic construct
  source 1..9: note = Seed: VVVGAGDVG (KRAS G13D)
FVVQAHDVE

SEQ ID NO: 86351 - protein, 9 aa, synthetic construct
  source 1..9: note = Seed: VVVGAGDVG (KRAS G13D)
FVVQAHDVG

SEQ ID NO: 86352 - protein, 9 aa, synthetic construct
  source 1..9: note = Seed: VVVGAGDVG (KRAS G13D)
FVVQAHDVI

SEQ ID NO: 86353 - protein, 9 aa, synthetic construct
  source 1..9: note = Seed: VVVGAGDVG (KRAS G13D)
FVVQAHDVL

SEQ ID NO: 86354 - protein, 9 aa, synthetic construct
  source 1..9: note = Seed: VVVGAGDVG (KRAS G13D)
FVVQAHDVM

SEQ ID NO: 86355 - protein, 9 aa, synthetic construct
  source 1..9: note = Seed: VVVGAGDVG (KRAS G13D)
FVVQAHDVN

SEQ ID NO: 86356 - protein, 9 aa, synthetic construct
  source 1..9: note = Seed: VVVGAGDVG (KRAS G13D)
FVVQAHDVQ

SEQ ID NO: 86357 - protein, 9 aa, synthetic construct
  source 1..9: note = Seed: VVVGAGDVG (KRAS G13D)
FVVQAHDVS

SEQ ID NO: 86358 - protein, 9 aa, synthetic construct
  source 1..9: note = Seed: VVVGAGDVG (KRAS G13D)
FVVQAHDVT

SEQ ID NO: 86359 - protein, 9 aa, synthetic construct
  source 1..9: note = Seed: VVVGAGDVG (KRAS G13D)
FVVQAHDVV

SEQ ID NO: 86360 - protein, 9 aa, synthetic construct
  source 1..9: note = Seed: VVVGAGDVG (KRAS G13D)
FVVQAIDVA

SEQ ID NO: 86361 - protein, 9 aa, synthetic construct
  source 1..9: note = Seed: VVVGAGDVG (KRAS G13D)
FVVQAIDVC

SEQ ID NO: 86362 - protein, 9 aa, synthetic construct
  source 1..9: note = Seed: VVVGAGDVG (KRAS G13D)
FVVQAIDVD

SEQ ID NO: 86363 - protein, 9 aa, synthetic construct
  source 1..9: note = Seed: VVVGAGDVG (KRAS G13D)
FVVQAIDVE

SEQ ID NO: 86364 - protein, 9 aa, synthetic construct
  source 1..9: note = Seed: VVVGAGDVG (KRAS G13D)
FVVQAIDVF

SEQ ID NO: 86365 - protein, 9 aa, synthetic construct
  source 1..9: note = Seed: VVVGAGDVG (KRAS G13D)
FVVQAIDVG

SEQ ID NO: 86366 - protein, 9 aa, synthetic construct
  source 1..9: note = Seed: VVVGAGDVG (KRAS G13D)
FVVQAIDVH

SEQ ID NO: 86367 - protein, 9 aa, synthetic construct
  source 1..9: note = Seed: VVVGAGDVG (KRAS G13D)
FVVQAIDVI

SEQ ID NO: 86368 - protein, 9 aa, synthetic construct
  source 1..9: note = Seed: VVVGAGDVG (KRAS G13D)
FVVQAIDVK

SEQ ID NO: 86369 - protein, 9 aa, synthetic construct
  source 1..9: note = Seed: VVVGAGDVG (KRAS G13D)
FVVQAIDVL

SEQ ID NO: 86370 - protein, 9 aa, synthetic construct
  source 1..9: note = Seed: VVVGAGDVG (KRAS G13D)
FVVQAIDVM

SEQ ID NO: 86371 - protein, 9 aa, synthetic construct
  source 1..9: note = Seed: VVVGAGDVG (KRAS G13D)
FVVQAIDVN

SEQ ID NO: 86372 - protein, 9 aa, synthetic construct
  source 1..9: note = Seed: VVVGAGDVG (KRAS G13D)
FVVQAIDVP

SEQ ID NO: 86373 - protein, 9 aa, synthetic construct
  source 1..9: note = Seed: VVVGAGDVG (KRAS G13D)
FVVQAIDVQ

SEQ ID NO: 86374 - protein, 9 aa, synthetic construct
  source 1..9: note = Seed: VVVGAGDVG (KRAS G13D)
FVVQAIDVR

SEQ ID NO: 86375 - protein, 9 aa, synthetic construct
  source 1..9: note = Seed: VVVGAGDVG (KRAS G13D)
FVVQAIDVS

SEQ ID NO: 86376 - protein, 9 aa, synthetic construct
  source 1..9: note = Seed: VVVGAGDVG (KRAS G13D)
FVVQAIDVT

SEQ ID NO: 86377 - protein, 9 aa, synthetic construct
  source 1..9: note = Seed: VVVGAGDVG (KRAS G13D)
FVVQAIDVV

SEQ ID NO: 86378 - protein, 9 aa, synthetic construct
  source 1..9: note = Seed: VVVGAGDVG (KRAS G13D)
FVVQAIDVY

SEQ ID NO: 86379 - protein, 9 aa, synthetic construct
  source 1..9: note = Seed: VVVGAGDVG (KRAS G13D)
FVVQALDVA

SEQ ID NO: 86380 - protein, 9 aa, synthetic construct
  source 1..9: note = Seed: VVVGAGDVG (KRAS G13D)
FVVQALDVC

SEQ ID NO: 86381 - protein, 9 aa, synthetic construct
  source 1..9: note = Seed: VVVGAGDVG (KRAS G13D)
FVVQALDVG

SEQ ID NO: 86382 - protein, 9 aa, synthetic construct
  source 1..9: note = Seed: VVVGAGDVG (KRAS G13D)
FVVQALDVI

SEQ ID NO: 86383 - protein, 9 aa, synthetic construct
  source 1..9: note = Seed: VVVGAGDVG (KRAS G13D)
FVVQALDVL

SEQ ID NO: 86384 - protein, 9 aa, synthetic construct
  source 1..9: note = Seed: VVVGAGDVG (KRAS G13D)
FVVQALDVM

SEQ ID NO: 86385 - protein, 9 aa, synthetic construct
  source 1..9: note = Seed: VVVGAGDVG (KRAS G13D)
FVVQALDVS

SEQ ID NO: 86386 - protein, 9 aa, synthetic construct
  source 1..9: note = Seed: VVVGAGDVG (KRAS G13D)
FVVQALDVT

SEQ ID NO: 86387 - protein, 9 aa, synthetic construct
  source 1..9: note = Seed: VVVGAGDVG (KRAS G13D)
FVVQALDVV

SEQ ID NO: 86388 - protein, 9 aa, synthetic construct
  source 1..9: note = Seed: VVVGAGDVG (KRAS G13D)
FVVQAMDVC

SEQ ID NO: 86389 - protein, 9 aa, synthetic construct
  source 1..9: note = Seed: VVVGAGDVG (KRAS G13D)
FVVQAMDVG

SEQ ID NO: 86390 - protein, 9 aa, synthetic construct
  source 1..9: note = Seed: VVVGAGDVG (KRAS G13D)
FVVQAMDVS

SEQ ID NO: 86391 - protein, 9 aa, synthetic construct
  source 1..9: note = Seed: VVVGAGDVG (KRAS G13D)
FVVQANDVA

SEQ ID NO: 86392 - protein, 9 aa, synthetic construct
  source 1..9: note = Seed: VVVGAGDVG (KRAS G13D)
FVVQANDVC

SEQ ID NO: 86393 - protein, 9 aa, synthetic construct
  source 1..9: note = Seed: VVVGAGDVG (KRAS G13D)
FVVQANDVD

SEQ ID NO: 86394 - protein, 9 aa, synthetic construct
  source 1..9: note = Seed: VVVGAGDVG (KRAS G13D)
FVVQANDVE

SEQ ID NO: 86395 - protein, 9 aa, synthetic construct
  source 1..9: note = Seed: VVVGAGDVG (KRAS G13D)
FVVQANDVF

SEQ ID NO: 86396 - protein, 9 aa, synthetic construct
  source 1..9: note = Seed: VVVGAGDVG (KRAS G13D)
FVVQANDVG

SEQ ID NO: 86397 - protein, 9 aa, synthetic construct
  source 1..9: note = Seed: VVVGAGDVG (KRAS G13D)
FVVQANDVH

SEQ ID NO: 86398 - protein, 9 aa, synthetic construct
  source 1..9: note = Seed: VVVGAGDVG (KRAS G13D)
FVVQANDVI

SEQ ID NO: 86399 - protein, 9 aa, synthetic construct
  source 1..9: note = Seed: VVVGAGDVG (KRAS G13D)
FVVQANDVL

SEQ ID NO: 86400 - protein, 9 aa, synthetic construct
  source 1..9: note = Seed: VVVGAGDVG (KRAS G13D)
FVVQANDVM

SEQ ID NO: 86401 - protein, 9 aa, synthetic construct
  source 1..9: note = Seed: VVVGAGDVG (KRAS G13D)
FVVQANDVN

SEQ ID NO: 86402 - protein, 9 aa, synthetic construct
  source 1..9: note = Seed: VVVGAGDVG (KRAS G13D)
FVVQANDVP

SEQ ID NO: 86403 - protein, 9 aa, synthetic construct
  source 1..9: note = Seed: VVVGAGDVG (KRAS G13D)
FVVQANDVQ

SEQ ID NO: 86404 - protein, 9 aa, synthetic construct
  source 1..9: note = Seed: VVVGAGDVG (KRAS G13D)
FVVQANDVR

SEQ ID NO: 86405 - protein, 9 aa, synthetic construct
  source 1..9: note = Seed: VVVGAGDVG (KRAS G13D)
FVVQANDVS

SEQ ID NO: 86406 - protein, 9 aa, synthetic construct
  source 1..9: note = Seed: VVVGAGDVG (KRAS G13D)
FVVQANDVT

SEQ ID NO: 86407 - protein, 9 aa, synthetic construct
  source 1..9: note = Seed: VVVGAGDVG (KRAS G13D)
FVVQANDVV

SEQ ID NO: 86408 - protein, 9 aa, synthetic construct
  source 1..9: note = Seed: VVVGAGDVG (KRAS G13D)
FVVQANDVW

SEQ ID NO: 86409 - protein, 9 aa, synthetic construct
  source 1..9: note = Seed: VVVGAGDVG (KRAS G13D)
FVVQANDVY

SEQ ID NO: 86410 - protein, 9 aa, synthetic construct
  source 1..9: note = Seed: VVVGAGDVG (KRAS G13D)
FVVQAPDVA

SEQ ID NO: 86411 - protein, 9 aa, synthetic construct
  source 1..9: note = Seed: VVVGAGDVG (KRAS G13D)
FVVQAPDVC

SEQ ID NO: 86412 - protein, 9 aa, synthetic construct
  source 1..9: note = Seed: VVVGAGDVG (KRAS G13D)
FVVQAPDVD

SEQ ID NO: 86413 - protein, 9 aa, synthetic construct
  source 1..9: note = Seed: VVVGAGDVG (KRAS G13D)
FVVQAPDVE

SEQ ID NO: 86414 - protein, 9 aa, synthetic construct
  source 1..9: note = Seed: VVVGAGDVG (KRAS G13D)
FVVQAPDVF

SEQ ID NO: 86415 - protein, 9 aa, synthetic construct
  source 1..9: note = Seed: VVVGAGDVG (KRAS G13D)
FVVQAPDVG

SEQ ID NO: 86416 - protein, 9 aa, synthetic construct
  source 1..9: note = Seed: VVVGAGDVG (KRAS G13D)
FVVQAPDVH

SEQ ID NO: 86417 - protein, 9 aa, synthetic construct
  source 1..9: note = Seed: VVVGAGDVG (KRAS G13D)
FVVQAPDVI

SEQ ID NO: 86418 - protein, 9 aa, synthetic construct
  source 1..9: note = Seed: VVVGAGDVG (KRAS G13D)
FVVQAPDVK

SEQ ID NO: 86419 - protein, 9 aa, synthetic construct
  source 1..9: note = Seed: VVVGAGDVG (KRAS G13D)
FVVQAPDVL

SEQ ID NO: 86420 - protein, 9 aa, synthetic construct
  source 1..9: note = Seed: VVVGAGDVG (KRAS G13D)
FVVQAPDVM

SEQ ID NO: 86421 - protein, 9 aa, synthetic construct
  source 1..9: note = Seed: VVVGAGDVG (KRAS G13D)
FVVQAPDVN

SEQ ID NO: 86422 - protein, 9 aa, synthetic construct
  source 1..9: note = Seed: VVVGAGDVG (KRAS G13D)
FVVQAPDVP

SEQ ID NO: 86423 - protein, 9 aa, synthetic construct
  source 1..9: note = Seed: VVVGAGDVG (KRAS G13D)
FVVQAPDVQ

SEQ ID NO: 86424 - protein, 9 aa, synthetic construct
  source 1..9: note = Seed: VVVGAGDVG (KRAS G13D)
FVVQAPDVR

SEQ ID NO: 86425 - protein, 9 aa, synthetic construct
  source 1..9: note = Seed: VVVGAGDVG (KRAS G13D)
FVVQAPDVS

SEQ ID NO: 86426 - protein, 9 aa, synthetic construct
  source 1..9: note = Seed: VVVGAGDVG (KRAS G13D)
FVVQAPDVT

SEQ ID NO: 86427 - protein, 9 aa, synthetic construct
  source 1..9: note = Seed: VVVGAGDVG (KRAS G13D)
FVVQAPDVV

SEQ ID NO: 86428 - protein, 9 aa, synthetic construct
  source 1..9: note = Seed: VVVGAGDVG (KRAS G13D)
FVVQAPDVW

SEQ ID NO: 86429 - protein, 9 aa, synthetic construct
  source 1..9: note = Seed: VVVGAGDVG (KRAS G13D)
FVVQAPDVY

SEQ ID NO: 86430 - protein, 9 aa, synthetic construct
  source 1..9: note = Seed: VVVGAGDVG (KRAS G13D)
FVVQAQDVA

SEQ ID NO: 86431 - protein, 9 aa, synthetic construct
  source 1..9: note = Seed: VVVGAGDVG (KRAS G13D)
FVVQAQDVG

SEQ ID NO: 86432 - protein, 9 aa, synthetic construct
  source 1..9: note = Seed: VVVGAGDVG (KRAS G13D)
FVVQAQDVH

SEQ ID NO: 86433 - protein, 9 aa, synthetic construct
  source 1..9: note = Seed: VVVGAGDVG (KRAS G13D)
FVVQAQDVI

SEQ ID NO: 86434 - protein, 9 aa, synthetic construct
  source 1..9: note = Seed: VVVGAGDVG (KRAS G13D)
FVVQAQDVL

SEQ ID NO: 86435 - protein, 9 aa, synthetic construct
  source 1..9: note = Seed: VVVGAGDVG (KRAS G13D)
FVVQAQDVM

SEQ ID NO: 86436 - protein, 9 aa, synthetic construct
  source 1..9: note = Seed: VVVGAGDVG (KRAS G13D)
FVVQAQDVN

SEQ ID NO: 86437 - protein, 9 aa, synthetic construct
  source 1..9: note = Seed: VVVGAGDVG (KRAS G13D)
FVVQAQDVQ

SEQ ID NO: 86438 - protein, 9 aa, synthetic construct
  source 1..9: note = Seed: VVVGAGDVG (KRAS G13D)
FVVQAQDVS

SEQ ID NO: 86439 - protein, 9 aa, synthetic construct
  source 1..9: note = Seed: VVVGAGDVG (KRAS G13D)
FVVQAQDVT

SEQ ID NO: 86440 - protein, 9 aa, synthetic construct
  source 1..9: note = Seed: VVVGAGDVG (KRAS G13D)
FVVQAQDVV

SEQ ID NO: 86441 - protein, 9 aa, synthetic construct
  source 1..9: note = Seed: VVVGAGDVG (KRAS G13D)
FVVQARDVA

SEQ ID NO: 86442 - protein, 9 aa, synthetic construct
  source 1..9: note = Seed: VVVGAGDVG (KRAS G13D)
FVVQARDVL

SEQ ID NO: 86443 - protein, 9 aa, synthetic construct
  source 1..9: note = Seed: VVVGAGDVG (KRAS G13D)
FVVQARDVM

SEQ ID NO: 86444 - protein, 9 aa, synthetic construct
  source 1..9: note = Seed: VVVGAGDVG (KRAS G13D)
FVVQARDVN

SEQ ID NO: 86445 - protein, 9 aa, synthetic construct
  source 1..9: note = Seed: VVVGAGDVG (KRAS G13D)
FVVQARDVS

SEQ ID NO: 86446 - protein, 9 aa, synthetic construct
  source 1..9: note = Seed: VVVGAGDVG (KRAS G13D)
FVVQARDVV

SEQ ID NO: 86447 - protein, 9 aa, synthetic construct
  source 1..9: note = Seed: VVVGAGDVG (KRAS G13D)
FVVQASDVA

SEQ ID NO: 86448 - protein, 9 aa, synthetic construct
  source 1..9: note = Seed: VVVGAGDVG (KRAS G13D)
FVVQASDVC

SEQ ID NO: 86449 - protein, 9 aa, synthetic construct
  source 1..9: note = Seed: VVVGAGDVG (KRAS G13D)
FVVQASDVD

SEQ ID NO: 86450 - protein, 9 aa, synthetic construct
  source 1..9: note = Seed: VVVGAGDVG (KRAS G13D)
FVVQASDVE

SEQ ID NO: 86451 - protein, 9 aa, synthetic construct
  source 1..9: note = Seed: VVVGAGDVG (KRAS G13D)
FVVQASDVF

SEQ ID NO: 86452 - protein, 9 aa, synthetic construct
  source 1..9: note = Seed: VVVGAGDVG (KRAS G13D)
FVVQASDVG

SEQ ID NO: 86453 - protein, 9 aa, synthetic construct
  source 1..9: note = Seed: VVVGAGDVG (KRAS G13D)
FVVQASDVH

SEQ ID NO: 86454 - protein, 9 aa, synthetic construct
  source 1..9: note = Seed: VVVGAGDVG (KRAS G13D)
FVVQASDVI

SEQ ID NO: 86455 - protein, 9 aa, synthetic construct
  source 1..9: note = Seed: VVVGAGDVG (KRAS G13D)
FVVQASDVK

SEQ ID NO: 86456 - protein, 9 aa, synthetic construct
  source 1..9: note = Seed: VVVGAGDVG (KRAS G13D)
FVVQASDVL

SEQ ID NO: 86457 - protein, 9 aa, synthetic construct
  source 1..9: note = Seed: VVVGAGDVG (KRAS G13D)
FVVQASDVM

SEQ ID NO: 86458 - protein, 9 aa, synthetic construct
  source 1..9: note = Seed: VVVGAGDVG (KRAS G13D)
FVVQASDVN

SEQ ID NO: 86459 - protein, 9 aa, synthetic construct
  source 1..9: note = Seed: VVVGAGDVG (KRAS G13D)
FVVQASDVP

SEQ ID NO: 86460 - protein, 9 aa, synthetic construct
  source 1..9: note = Seed: VVVGAGDVG (KRAS G13D)
FVVQASDVQ

SEQ ID NO: 86461 - protein, 9 aa, synthetic construct
  source 1..9: note = Seed: VVVGAGDVG (KRAS G13D)
FVVQASDVR

SEQ ID NO: 86462 - protein, 9 aa, synthetic construct
  source 1..9: note = Seed: VVVGAGDVG (KRAS G13D)
FVVQASDVS

SEQ ID NO: 86463 - protein, 9 aa, synthetic construct
  source 1..9: note = Seed: VVVGAGDVG (KRAS G13D)
FVVQASDVT

SEQ ID NO: 86464 - protein, 9 aa, synthetic construct
  source 1..9: note = Seed: VVVGAGDVG (KRAS G13D)
FVVQASDVV

SEQ ID NO: 86465 - protein, 9 aa, synthetic construct
  source 1..9: note = Seed: VVVGAGDVG (KRAS G13D)
FVVQASDVW

SEQ ID NO: 86466 - protein, 9 aa, synthetic construct
  source 1..9: note = Seed: VVVGAGDVG (KRAS G13D)
FVVQASDVY

SEQ ID NO: 86467 - protein, 9 aa, synthetic construct
  source 1..9: note = Seed: VVVGAGDVG (KRAS G13D)
FVVQATDVA

SEQ ID NO: 86468 - protein, 9 aa, synthetic construct
  source 1..9: note = Seed: VVVGAGDVG (KRAS G13D)
FVVQATDVC

SEQ ID NO: 86469 - protein, 9 aa, synthetic construct
  source 1..9: note = Seed: VVVGAGDVG (KRAS G13D)
FVVQATDVD

SEQ ID NO: 86470 - protein, 9 aa, synthetic construct
  source 1..9: note = Seed: VVVGAGDVG (KRAS G13D)
FVVQATDVE

SEQ ID NO: 86471 - protein, 9 aa, synthetic construct
  source 1..9: note = Seed: VVVGAGDVG (KRAS G13D)
FVVQATDVF

SEQ ID NO: 86472 - protein, 9 aa, synthetic construct
  source 1..9: note = Seed: VVVGAGDVG (KRAS G13D)
FVVQATDVG

SEQ ID NO: 86473 - protein, 9 aa, synthetic construct
  source 1..9: note = Seed: VVVGAGDVG (KRAS G13D)
FVVQATDVH

SEQ ID NO: 86474 - protein, 9 aa, synthetic construct
  source 1..9: note = Seed: VVVGAGDVG (KRAS G13D)
FVVQATDVI

SEQ ID NO: 86475 - protein, 9 aa, synthetic construct
  source 1..9: note = Seed: VVVGAGDVG (KRAS G13D)
FVVQATDVK

SEQ ID NO: 86476 - protein, 9 aa, synthetic construct
  source 1..9: note = Seed: VVVGAGDVG (KRAS G13D)
FVVQATDVL

SEQ ID NO: 86477 - protein, 9 aa, synthetic construct
  source 1..9: note = Seed: VVVGAGDVG (KRAS G13D)
FVVQATDVM

SEQ ID NO: 86478 - protein, 9 aa, synthetic construct
  source 1..9: note = Seed: VVVGAGDVG (KRAS G13D)
FVVQATDVN

SEQ ID NO: 86479 - protein, 9 aa, synthetic construct
  source 1..9: note = Seed: VVVGAGDVG (KRAS G13D)
FVVQATDVP

SEQ ID NO: 86480 - protein, 9 aa, synthetic construct
  source 1..9: note = Seed: VVVGAGDVG (KRAS G13D)
FVVQATDVQ

SEQ ID NO: 86481 - protein, 9 aa, synthetic construct
  source 1..9: note = Seed: VVVGAGDVG (KRAS G13D)
FVVQATDVR

SEQ ID NO: 86482 - protein, 9 aa, synthetic construct
  source 1..9: note = Seed: VVVGAGDVG (KRAS G13D)
FVVQATDVS

SEQ ID NO: 86483 - protein, 9 aa, synthetic construct
  source 1..9: note = Seed: VVVGAGDVG (KRAS G13D)
FVVQATDVT

SEQ ID NO: 86484 - protein, 9 aa, synthetic construct
  source 1..9: note = Seed: VVVGAGDVG (KRAS G13D)
FVVQATDVV

SEQ ID NO: 86485 - protein, 9 aa, synthetic construct
  source 1..9: note = Seed: VVVGAGDVG (KRAS G13D)
FVVQATDVW

SEQ ID NO: 86486 - protein, 9 aa, synthetic construct
  source 1..9: note = Seed: VVVGAGDVG (KRAS G13D)
FVVQATDVY

SEQ ID NO: 86487 - protein, 9 aa, synthetic construct
  source 1..9: note = Seed: VVVGAGDVG (KRAS G13D)
FVVQAVDVA

SEQ ID NO: 86488 - protein, 9 aa, synthetic construct
  source 1..9: note = Seed: VVVGAGDVG (KRAS G13D)
FVVQAVDVC

SEQ ID NO: 86489 - protein, 9 aa, synthetic construct
  source 1..9: note = Seed: VVVGAGDVG (KRAS G13D)
FVVQAVDVD

SEQ ID NO: 86490 - protein, 9 aa, synthetic construct
  source 1..9: note = Seed: VVVGAGDVG (KRAS G13D)
FVVQAVDVE

SEQ ID NO: 86491 - protein, 9 aa, synthetic construct
  source 1..9: note = Seed: VVVGAGDVG (KRAS G13D)
FVVQAVDVF

SEQ ID NO: 86492 - protein, 9 aa, synthetic construct
  source 1..9: note = Seed: VVVGAGDVG (KRAS G13D)
FVVQAVDVG

SEQ ID NO: 86493 - protein, 9 aa, synthetic construct
  source 1..9: note = Seed: VVVGAGDVG (KRAS G13D)
FVVQAVDVH

SEQ ID NO: 86494 - protein, 9 aa, synthetic construct
  source 1..9: note = Seed: VVVGAGDVG (KRAS G13D)
FVVQAVDVI

SEQ ID NO: 86495 - protein, 9 aa, synthetic construct
  source 1..9: note = Seed: VVVGAGDVG (KRAS G13D)
FVVQAVDVK

SEQ ID NO: 86496 - protein, 9 aa, synthetic construct
  source 1..9: note = Seed: VVVGAGDVG (KRAS G13D)
FVVQAVDVL

SEQ ID NO: 86497 - protein, 9 aa, synthetic construct
  source 1..9: note = Seed: VVVGAGDVG (KRAS G13D)
FVVQAVDVM

SEQ ID NO: 86498 - protein, 9 aa, synthetic construct
  source 1..9: note = Seed: VVVGAGDVG (KRAS G13D)
FVVQAVDVN

SEQ ID NO: 86499 - protein, 9 aa, synthetic construct
  source 1..9: note = Seed: VVVGAGDVG (KRAS G13D)
FVVQAVDVP

SEQ ID NO: 86500 - protein, 9 aa, synthetic construct
  source 1..9: note = Seed: VVVGAGDVG (KRAS G13D)
FVVQAVDVQ

SEQ ID NO: 86501 - protein, 9 aa, synthetic construct
  source 1..9: note = Seed: VVVGAGDVG (KRAS G13D)
FVVQAVDVR

SEQ ID NO: 86502 - protein, 9 aa, synthetic construct
  source 1..9: note = Seed: VVVGAGDVG (KRAS G13D)
FVVQAVDVS

SEQ ID NO: 86503 - protein, 9 aa, synthetic construct
  source 1..9: note = Seed: VVVGAGDVG (KRAS G13D)
FVVQAVDVT

SEQ ID NO: 86504 - protein, 9 aa, synthetic construct
  source 1..9: note = Seed: VVVGAGDVG (KRAS G13D)
FVVQAVDVV

SEQ ID NO: 86505 - protein, 9 aa, synthetic construct
  source 1..9: note = Seed: VVVGAGDVG (KRAS G13D)
FVVQAVDVY

SEQ ID NO: 86506 - protein, 9 aa, synthetic construct
  source 1..9: note = Seed: VVVGAGDVG (KRAS G13D)
FVVQAWDVS

SEQ ID NO: 86507 - protein, 9 aa, synthetic construct
  source 1..9: note = Seed: VVVGAGDVG (KRAS G13D)
FVVQAYDVA

SEQ ID NO: 86508 - protein, 9 aa, synthetic construct
  source 1..9: note = Seed: VVVGAGDVG (KRAS G13D)
FVVQAYDVS

SEQ ID NO: 86509 - protein, 9 aa, synthetic construct
  source 1..9: note = Seed: VVVGAGDVG (KRAS G13D)
FVVRAADVA

SEQ ID NO: 86510 - protein, 9 aa, synthetic construct
  source 1..9: note = Seed: VVVGAGDVG (KRAS G13D)
FVVRAADVC

SEQ ID NO: 86511 - protein, 9 aa, synthetic construct
  source 1..9: note = Seed: VVVGAGDVG (KRAS G13D)
FVVRAADVD

SEQ ID NO: 86512 - protein, 9 aa, synthetic construct
  source 1..9: note = Seed: VVVGAGDVG (KRAS G13D)
FVVRAADVG

SEQ ID NO: 86513 - protein, 9 aa, synthetic construct
  source 1..9: note = Seed: VVVGAGDVG (KRAS G13D)
FVVRAADVI

SEQ ID NO: 86514 - protein, 9 aa, synthetic construct
  source 1..9: note = Seed: VVVGAGDVG (KRAS G13D)
FVVRAADVL

SEQ ID NO: 86515 - protein, 9 aa, synthetic construct
  source 1..9: note = Seed: VVVGAGDVG (KRAS G13D)
FVVRAADVM

SEQ ID NO: 86516 - protein, 9 aa, synthetic construct
  source 1..9: note = Seed: VVVGAGDVG (KRAS G13D)
FVVRAADVS

SEQ ID NO: 86517 - protein, 9 aa, synthetic construct
  source 1..9: note = Seed: VVVGAGDVG (KRAS G13D)
FVVRAADVT

SEQ ID NO: 86518 - protein, 9 aa, synthetic construct
  source 1..9: note = Seed: VVVGAGDVG (KRAS G13D)
FVVRAADVV

SEQ ID NO: 86519 - protein, 9 aa, synthetic construct
  source 1..9: note = Seed: VVVGAGDVG (KRAS G13D)
FVVRAGDVA

SEQ ID NO: 86520 - protein, 9 aa, synthetic construct
  source 1..9: note = Seed: VVVGAGDVG (KRAS G13D)
FVVRAGDVI

SEQ ID NO: 86521 - protein, 9 aa, synthetic construct
  source 1..9: note = Seed: VVVGAGDVG (KRAS G13D)
FVVRAGDVL

SEQ ID NO: 86522 - protein, 9 aa, synthetic construct
  source 1..9: note = Seed: VVVGAGDVG (KRAS G13D)
FVVRAGDVM

SEQ ID NO: 86523 - protein, 9 aa, synthetic construct
  source 1..9: note = Seed: VVVGAGDVG (KRAS G13D)
FVVRAGDVS

SEQ ID NO: 86524 - protein, 9 aa, synthetic construct
  source 1..9: note = Seed: VVVGAGDVG (KRAS G13D)
FVVRAGDVV

SEQ ID NO: 86525 - protein, 9 aa, synthetic construct
  source 1..9: note = Seed: VVVGAGDVG (KRAS G13D)
FVVRANDVA

SEQ ID NO: 86526 - protein, 9 aa, synthetic construct
  source 1..9: note = Seed: VVVGAGDVG (KRAS G13D)
FVVRANDVC

SEQ ID NO: 86527 - protein, 9 aa, synthetic construct
  source 1..9: note = Seed: VVVGAGDVG (KRAS G13D)
FVVRANDVG

SEQ ID NO: 86528 - protein, 9 aa, synthetic construct
  source 1..9: note = Seed: VVVGAGDVG (KRAS G13D)
FVVRANDVL

SEQ ID NO: 86529 - protein, 9 aa, synthetic construct
  source 1..9: note = Seed: VVVGAGDVG (KRAS G13D)
FVVRANDVN

SEQ ID NO: 86530 - protein, 9 aa, synthetic construct
  source 1..9: note = Seed: VVVGAGDVG (KRAS G13D)
FVVRANDVQ

SEQ ID NO: 86531 - protein, 9 aa, synthetic construct
  source 1..9: note = Seed: VVVGAGDVG (KRAS G13D)
FVVRANDVS

SEQ ID NO: 86532 - protein, 9 aa, synthetic construct
  source 1..9: note = Seed: VVVGAGDVG (KRAS G13D)
FVVRAPDVA

SEQ ID NO: 86533 - protein, 9 aa, synthetic construct
  source 1..9: note = Seed: VVVGAGDVG (KRAS G13D)
FVVRAPDVG

SEQ ID NO: 86534 - protein, 9 aa, synthetic construct
  source 1..9: note = Seed: VVVGAGDVG (KRAS G13D)
FVVRAPDVI

SEQ ID NO: 86535 - protein, 9 aa, synthetic construct
  source 1..9: note = Seed: VVVGAGDVG (KRAS G13D)
FVVRAPDVL

SEQ ID NO: 86536 - protein, 9 aa, synthetic construct
  source 1..9: note = Seed: VVVGAGDVG (KRAS G13D)
FVVRAPDVM

SEQ ID NO: 86537 - protein, 9 aa, synthetic construct
  source 1..9: note = Seed: VVVGAGDVG (KRAS G13D)
FVVRAPDVN

SEQ ID NO: 86538 - protein, 9 aa, synthetic construct
  source 1..9: note = Seed: VVVGAGDVG (KRAS G13D)
FVVRAPDVQ

SEQ ID NO: 86539 - protein, 9 aa, synthetic construct
  source 1..9: note = Seed: VVVGAGDVG (KRAS G13D)
FVVRAPDVS

SEQ ID NO: 86540 - protein, 9 aa, synthetic construct
  source 1..9: note = Seed: VVVGAGDVG (KRAS G13D)
FVVRAPDVT

SEQ ID NO: 86541 - protein, 9 aa, synthetic construct
  source 1..9: note = Seed: VVVGAGDVG (KRAS G13D)
FVVRAPDVV

SEQ ID NO: 86542 - protein, 9 aa, synthetic construct
  source 1..9: note = Seed: VVVGAGDVG (KRAS G13D)
FVVRASDVA

SEQ ID NO: 86543 - protein, 9 aa, synthetic construct
  source 1..9: note = Seed: VVVGAGDVG (KRAS G13D)
FVVRASDVC

SEQ ID NO: 86544 - protein, 9 aa, synthetic construct
  source 1..9: note = Seed: VVVGAGDVG (KRAS G13D)
FVVRASDVD

SEQ ID NO: 86545 - protein, 9 aa, synthetic construct
  source 1..9: note = Seed: VVVGAGDVG (KRAS G13D)
FVVRASDVG

SEQ ID NO: 86546 - protein, 9 aa, synthetic construct
  source 1..9: note = Seed: VVVGAGDVG (KRAS G13D)
FVVRASDVI

SEQ ID NO: 86547 - protein, 9 aa, synthetic construct
  source 1..9: note = Seed: VVVGAGDVG (KRAS G13D)
FVVRASDVL

SEQ ID NO: 86548 - protein, 9 aa, synthetic construct
  source 1..9: note = Seed: VVVGAGDVG (KRAS G13D)
FVVRASDVM

SEQ ID NO: 86549 - protein, 9 aa, synthetic construct
  source 1..9: note = Seed: VVVGAGDVG (KRAS G13D)
FVVRASDVN

SEQ ID NO: 86550 - protein, 9 aa, synthetic construct
  source 1..9: note = Seed: VVVGAGDVG (KRAS G13D)
FVVRASDVQ

SEQ ID NO: 86551 - protein, 9 aa, synthetic construct
  source 1..9: note = Seed: VVVGAGDVG (KRAS G13D)
FVVRASDVS

SEQ ID NO: 86552 - protein, 9 aa, synthetic construct
  source 1..9: note = Seed: VVVGAGDVG (KRAS G13D)
FVVRASDVT

SEQ ID NO: 86553 - protein, 9 aa, synthetic construct
  source 1..9: note = Seed: VVVGAGDVG (KRAS G13D)
FVVRASDVV

SEQ ID NO: 86554 - protein, 9 aa, synthetic construct
  source 1..9: note = Seed: VVVGAGDVG (KRAS G13D)
FVVRATDVA

SEQ ID NO: 86555 - protein, 9 aa, synthetic construct
  source 1..9: note = Seed: VVVGAGDVG (KRAS G13D)
FVVRATDVC

SEQ ID NO: 86556 - protein, 9 aa, synthetic construct
  source 1..9: note = Seed: VVVGAGDVG (KRAS G13D)
FVVRATDVD

SEQ ID NO: 86557 - protein, 9 aa, synthetic construct
  source 1..9: note = Seed: VVVGAGDVG (KRAS G13D)
FVVRATDVE

SEQ ID NO: 86558 - protein, 9 aa, synthetic construct
  source 1..9: note = Seed: VVVGAGDVG (KRAS G13D)
FVVRATDVG

SEQ ID NO: 86559 - protein, 9 aa, synthetic construct
  source 1..9: note = Seed: VVVGAGDVG (KRAS G13D)
FVVRATDVH

SEQ ID NO: 86560 - protein, 9 aa, synthetic construct
  source 1..9: note = Seed: VVVGAGDVG (KRAS G13D)
FVVRATDVL

SEQ ID NO: 86561 - protein, 9 aa, synthetic construct
  source 1..9: note = Seed: VVVGAGDVG (KRAS G13D)
FVVRATDVM

SEQ ID NO: 86562 - protein, 9 aa, synthetic construct
  source 1..9: note = Seed: VVVGAGDVG (KRAS G13D)
FVVRATDVN

SEQ ID NO: 86563 - protein, 9 aa, synthetic construct
  source 1..9: note = Seed: VVVGAGDVG (KRAS G13D)
FVVRATDVQ

SEQ ID NO: 86564 - protein, 9 aa, synthetic construct
  source 1..9: note = Seed: VVVGAGDVG (KRAS G13D)
FVVRATDVS

SEQ ID NO: 86565 - protein, 9 aa, synthetic construct
  source 1..9: note = Seed: VVVGAGDVG (KRAS G13D)
FVVRATDVT

SEQ ID NO: 86566 - protein, 9 aa, synthetic construct
  source 1..9: note = Seed: VVVGAGDVG (KRAS G13D)
FVVRATDVV

SEQ ID NO: 86567 - protein, 9 aa, synthetic construct
  source 1..9: note = Seed: VVVGAGDVG (KRAS G13D)
FVVRAVDVC

SEQ ID NO: 86568 - protein, 9 aa, synthetic construct
  source 1..9: note = Seed: VVVGAGDVG (KRAS G13D)
FVVRAVDVG

SEQ ID NO: 86569 - protein, 9 aa, synthetic construct
  source 1..9: note = Seed: VVVGAGDVG (KRAS G13D)
FVVSAADVA

SEQ ID NO: 86570 - protein, 9 aa, synthetic construct
  source 1..9: note = Seed: VVVGAGDVG (KRAS G13D)
FVVSAADVC

SEQ ID NO: 86571 - protein, 9 aa, synthetic construct
  source 1..9: note = Seed: VVVGAGDVG (KRAS G13D)
FVVSAADVD

SEQ ID NO: 86572 - protein, 9 aa, synthetic construct
  source 1..9: note = Seed: VVVGAGDVG (KRAS G13D)
FVVSAADVE

SEQ ID NO: 86573 - protein, 9 aa, synthetic construct
  source 1..9: note = Seed: VVVGAGDVG (KRAS G13D)
FVVSAADVF

SEQ ID NO: 86574 - protein, 9 aa, synthetic construct
  source 1..9: note = Seed: VVVGAGDVG (KRAS G13D)
FVVSAADVG

SEQ ID NO: 86575 - protein, 9 aa, synthetic construct
  source 1..9: note = Seed: VVVGAGDVG (KRAS G13D)
FVVSAADVH

SEQ ID NO: 86576 - protein, 9 aa, synthetic construct
  source 1..9: note = Seed: VVVGAGDVG (KRAS G13D)
FVVSAADVI

SEQ ID NO: 86577 - protein, 9 aa, synthetic construct
  source 1..9: note = Seed: VVVGAGDVG (KRAS G13D)
FVVSAADVK

SEQ ID NO: 86578 - protein, 9 aa, synthetic construct
  source 1..9: note = Seed: VVVGAGDVG (KRAS G13D)
FVVSAADVL

SEQ ID NO: 86579 - protein, 9 aa, synthetic construct
  source 1..9: note = Seed: VVVGAGDVG (KRAS G13D)
FVVSAADVM

SEQ ID NO: 86580 - protein, 9 aa, synthetic construct
  source 1..9: note = Seed: VVVGAGDVG (KRAS G13D)
FVVSAADVN

SEQ ID NO: 86581 - protein, 9 aa, synthetic construct
  source 1..9: note = Seed: VVVGAGDVG (KRAS G13D)
FVVSAADVP

SEQ ID NO: 86582 - protein, 9 aa, synthetic construct
  source 1..9: note = Seed: VVVGAGDVG (KRAS G13D)
FVVSAADVQ

SEQ ID NO: 86583 - protein, 9 aa, synthetic construct
  source 1..9: note = Seed: VVVGAGDVG (KRAS G13D)
FVVSAADVR

SEQ ID NO: 86584 - protein, 9 aa, synthetic construct
  source 1..9: note = Seed: VVVGAGDVG (KRAS G13D)
FVVSAADVS

SEQ ID NO: 86585 - protein, 9 aa, synthetic construct
  source 1..9: note = Seed: VVVGAGDVG (KRAS G13D)
FVVSAADVT

SEQ ID NO: 86586 - protein, 9 aa, synthetic construct
  source 1..9: note = Seed: VVVGAGDVG (KRAS G13D)
FVVSAADVV

SEQ ID NO: 86587 - protein, 9 aa, synthetic construct
  source 1..9: note = Seed: VVVGAGDVG (KRAS G13D)
FVVSAADVW

SEQ ID NO: 86588 - protein, 9 aa, synthetic construct
  source 1..9: note = Seed: VVVGAGDVG (KRAS G13D)
FVVSAADVY

SEQ ID NO: 86589 - protein, 9 aa, synthetic construct
  source 1..9: note = Seed: VVVGAGDVG (KRAS G13D)
FVVSACDVA

SEQ ID NO: 86590 - protein, 9 aa, synthetic construct
  source 1..9: note = Seed: VVVGAGDVG (KRAS G13D)
FVVSACDVN

SEQ ID NO: 86591 - protein, 9 aa, synthetic construct
  source 1..9: note = Seed: VVVGAGDVG (KRAS G13D)
FVVSACDVS

SEQ ID NO: 86592 - protein, 9 aa, synthetic construct
  source 1..9: note = Seed: VVVGAGDVG (KRAS G13D)
FVVSADDVA

SEQ ID NO: 86593 - protein, 9 aa, synthetic construct
  source 1..9: note = Seed: VVVGAGDVG (KRAS G13D)
FVVSADDVG

SEQ ID NO: 86594 - protein, 9 aa, synthetic construct
  source 1..9: note = Seed: VVVGAGDVG (KRAS G13D)
FVVSADDVI

SEQ ID NO: 86595 - protein, 9 aa, synthetic construct
  source 1..9: note = Seed: VVVGAGDVG (KRAS G13D)
FVVSADDVL

SEQ ID NO: 86596 - protein, 9 aa, synthetic construct
  source 1..9: note = Seed: VVVGAGDVG (KRAS G13D)
FVVSADDVN

SEQ ID NO: 86597 - protein, 9 aa, synthetic construct
  source 1..9: note = Seed: VVVGAGDVG (KRAS G13D)
FVVSADDVS

SEQ ID NO: 86598 - protein, 9 aa, synthetic construct
  source 1..9: note = Seed: VVVGAGDVG (KRAS G13D)
FVVSADDVV

SEQ ID NO: 86599 - protein, 9 aa, synthetic construct
  source 1..9: note = Seed: VVVGAGDVG (KRAS G13D)
FVVSAEDVA

SEQ ID NO: 86600 - protein, 9 aa, synthetic construct
  source 1..9: note = Seed: VVVGAGDVG (KRAS G13D)
FVVSAEDVH

SEQ ID NO: 86601 - protein, 9 aa, synthetic construct
  source 1..9: note = Seed: VVVGAGDVG (KRAS G13D)
FVVSAEDVI

SEQ ID NO: 86602 - protein, 9 aa, synthetic construct
  source 1..9: note = Seed: VVVGAGDVG (KRAS G13D)
FVVSAEDVL

SEQ ID NO: 86603 - protein, 9 aa, synthetic construct
  source 1..9: note = Seed: VVVGAGDVG (KRAS G13D)
FVVSAEDVM

SEQ ID NO: 86604 - protein, 9 aa, synthetic construct
  source 1..9: note = Seed: VVVGAGDVG (KRAS G13D)
FVVSAEDVN

SEQ ID NO: 86605 - protein, 9 aa, synthetic construct
  source 1..9: note = Seed: VVVGAGDVG (KRAS G13D)
FVVSAEDVQ

SEQ ID NO: 86606 - protein, 9 aa, synthetic construct
  source 1..9: note = Seed: VVVGAGDVG (KRAS G13D)
FVVSAEDVS

SEQ ID NO: 86607 - protein, 9 aa, synthetic construct
  source 1..9: note = Seed: VVVGAGDVG (KRAS G13D)
FVVSAEDVT

SEQ ID NO: 86608 - protein, 9 aa, synthetic construct
  source 1..9: note = Seed: VVVGAGDVG (KRAS G13D)
FVVSAEDVV

SEQ ID NO: 86609 - protein, 9 aa, synthetic construct
  source 1..9: note = Seed: VVVGAGDVG (KRAS G13D)
FVVSAFDVN

SEQ ID NO: 86610 - protein, 9 aa, synthetic construct
  source 1..9: note = Seed: VVVGAGDVG (KRAS G13D)
FVVSAFDVS

SEQ ID NO: 86611 - protein, 9 aa, synthetic construct
  source 1..9: note = Seed: VVVGAGDVG (KRAS G13D)
FVVSAGDVA

SEQ ID NO: 86612 - protein, 9 aa, synthetic construct
  source 1..9: note = Seed: VVVGAGDVG (KRAS G13D)
FVVSAGDVD

SEQ ID NO: 86613 - protein, 9 aa, synthetic construct
  source 1..9: note = Seed: VVVGAGDVG (KRAS G13D)
FVVSAGDVE

SEQ ID NO: 86614 - protein, 9 aa, synthetic construct
  source 1..9: note = Seed: VVVGAGDVG (KRAS G13D)
FVVSAGDVF

SEQ ID NO: 86615 - protein, 9 aa, synthetic construct
  source 1..9: note = Seed: VVVGAGDVG (KRAS G13D)
FVVSAGDVG

SEQ ID NO: 86616 - protein, 9 aa, synthetic construct
  source 1..9: note = Seed: VVVGAGDVG (KRAS G13D)
FVVSAGDVH

SEQ ID NO: 86617 - protein, 9 aa, synthetic construct
  source 1..9: note = Seed: VVVGAGDVG (KRAS G13D)
FVVSAGDVI

SEQ ID NO: 86618 - protein, 9 aa, synthetic construct
  source 1..9: note = Seed: VVVGAGDVG (KRAS G13D)
FVVSAGDVK

SEQ ID NO: 86619 - protein, 9 aa, synthetic construct
  source 1..9: note = Seed: VVVGAGDVG (KRAS G13D)
FVVSAGDVL

SEQ ID NO: 86620 - protein, 9 aa, synthetic construct
  source 1..9: note = Seed: VVVGAGDVG (KRAS G13D)
FVVSAGDVM

SEQ ID NO: 86621 - protein, 9 aa, synthetic construct
  source 1..9: note = Seed: VVVGAGDVG (KRAS G13D)
FVVSAGDVN

SEQ ID NO: 86622 - protein, 9 aa, synthetic construct
  source 1..9: note = Seed: VVVGAGDVG (KRAS G13D)
FVVSAGDVP

SEQ ID NO: 86623 - protein, 9 aa, synthetic construct
  source 1..9: note = Seed: VVVGAGDVG (KRAS G13D)
FVVSAGDVQ

SEQ ID NO: 86624 - protein, 9 aa, synthetic construct
  source 1..9: note = Seed: VVVGAGDVG (KRAS G13D)
FVVSAGDVR

SEQ ID NO: 86625 - protein, 9 aa, synthetic construct
  source 1..9: note = Seed: VVVGAGDVG (KRAS G13D)
FVVSAGDVS

SEQ ID NO: 86626 - protein, 9 aa, synthetic construct
  source 1..9: note = Seed: VVVGAGDVG (KRAS G13D)
FVVSAGDVT

SEQ ID NO: 86627 - protein, 9 aa, synthetic construct
  source 1..9: note = Seed: VVVGAGDVG (KRAS G13D)
FVVSAGDVV

SEQ ID NO: 86628 - protein, 9 aa, synthetic construct
  source 1..9: note = Seed: VVVGAGDVG (KRAS G13D)
FVVSAGDVY

SEQ ID NO: 86629 - protein, 9 aa, synthetic construct
  source 1..9: note = Seed: VVVGAGDVG (KRAS G13D)
FVVSAHDVA

SEQ ID NO: 86630 - protein, 9 aa, synthetic construct
  source 1..9: note = Seed: VVVGAGDVG (KRAS G13D)
FVVSAHDVG

SEQ ID NO: 86631 - protein, 9 aa, synthetic construct
  source 1..9: note = Seed: VVVGAGDVG (KRAS G13D)
FVVSAHDVI

SEQ ID NO: 86632 - protein, 9 aa, synthetic construct
  source 1..9: note = Seed: VVVGAGDVG (KRAS G13D)
FVVSAHDVL

SEQ ID NO: 86633 - protein, 9 aa, synthetic construct
  source 1..9: note = Seed: VVVGAGDVG (KRAS G13D)
FVVSAHDVM

SEQ ID NO: 86634 - protein, 9 aa, synthetic construct
  source 1..9: note = Seed: VVVGAGDVG (KRAS G13D)
FVVSAHDVN

SEQ ID NO: 86635 - protein, 9 aa, synthetic construct
  source 1..9: note = Seed: VVVGAGDVG (KRAS G13D)
FVVSAHDVQ

SEQ ID NO: 86636 - protein, 9 aa, synthetic construct
  source 1..9: note = Seed: VVVGAGDVG (KRAS G13D)
FVVSAHDVS

SEQ ID NO: 86637 - protein, 9 aa, synthetic construct
  source 1..9: note = Seed: VVVGAGDVG (KRAS G13D)
FVVSAHDVT

SEQ ID NO: 86638 - protein, 9 aa, synthetic construct
  source 1..9: note = Seed: VVVGAGDVG (KRAS G13D)
FVVSAHDVV

SEQ ID NO: 86639 - protein, 9 aa, synthetic construct
  source 1..9: note = Seed: VVVGAGDVG (KRAS G13D)
FVVSAIDVA

SEQ ID NO: 86640 - protein, 9 aa, synthetic construct
  source 1..9: note = Seed: VVVGAGDVG (KRAS G13D)
FVVSAIDVC

SEQ ID NO: 86641 - protein, 9 aa, synthetic construct
  source 1..9: note = Seed: VVVGAGDVG (KRAS G13D)
FVVSAIDVD

SEQ ID NO: 86642 - protein, 9 aa, synthetic construct
  source 1..9: note = Seed: VVVGAGDVG (KRAS G13D)
FVVSAIDVE

SEQ ID NO: 86643 - protein, 9 aa, synthetic construct
  source 1..9: note = Seed: VVVGAGDVG (KRAS G13D)
FVVSAIDVG

SEQ ID NO: 86644 - protein, 9 aa, synthetic construct
  source 1..9: note = Seed: VVVGAGDVG (KRAS G13D)
FVVSAIDVH

SEQ ID NO: 86645 - protein, 9 aa, synthetic construct
  source 1..9: note = Seed: VVVGAGDVG (KRAS G13D)
FVVSAIDVI

SEQ ID NO: 86646 - protein, 9 aa, synthetic construct
  source 1..9: note = Seed: VVVGAGDVG (KRAS G13D)
FVVSAIDVL

SEQ ID NO: 86647 - protein, 9 aa, synthetic construct
  source 1..9: note = Seed: VVVGAGDVG (KRAS G13D)
FVVSAIDVM

SEQ ID NO: 86648 - protein, 9 aa, synthetic construct
  source 1..9: note = Seed: VVVGAGDVG (KRAS G13D)
FVVSAIDVN

SEQ ID NO: 86649 - protein, 9 aa, synthetic construct
  source 1..9: note = Seed: VVVGAGDVG (KRAS G13D)
FVVSAIDVQ

SEQ ID NO: 86650 - protein, 9 aa, synthetic construct
  source 1..9: note = Seed: VVVGAGDVG (KRAS G13D)
FVVSAIDVS

SEQ ID NO: 86651 - protein, 9 aa, synthetic construct
  source 1..9: note = Seed: VVVGAGDVG (KRAS G13D)
FVVSAIDVT

SEQ ID NO: 86652 - protein, 9 aa, synthetic construct
  source 1..9: note = Seed: VVVGAGDVG (KRAS G13D)
FVVSAIDVV

SEQ ID NO: 86653 - protein, 9 aa, synthetic construct
  source 1..9: note = Seed: VVVGAGDVG (KRAS G13D)
FVVSAIDVY

SEQ ID NO: 86654 - protein, 9 aa, synthetic construct
  source 1..9: note = Seed: VVVGAGDVG (KRAS G13D)
FVVSALDVA

SEQ ID NO: 86655 - protein, 9 aa, synthetic construct
  source 1..9: note = Seed: VVVGAGDVG (KRAS G13D)
FVVSALDVC

SEQ ID NO: 86656 - protein, 9 aa, synthetic construct
  source 1..9: note = Seed: VVVGAGDVG (KRAS G13D)
FVVSALDVG

SEQ ID NO: 86657 - protein, 9 aa, synthetic construct
  source 1..9: note = Seed: VVVGAGDVG (KRAS G13D)
FVVSALDVI

SEQ ID NO: 86658 - protein, 9 aa, synthetic construct
  source 1..9: note = Seed: VVVGAGDVG (KRAS G13D)
FVVSALDVM

SEQ ID NO: 86659 - protein, 9 aa, synthetic construct
  source 1..9: note = Seed: VVVGAGDVG (KRAS G13D)
FVVSALDVS

SEQ ID NO: 86660 - protein, 9 aa, synthetic construct
  source 1..9: note = Seed: VVVGAGDVG (KRAS G13D)
FVVSALDVV

SEQ ID NO: 86661 - protein, 9 aa, synthetic construct
  source 1..9: note = Seed: VVVGAGDVG (KRAS G13D)
FVVSAMDVC

SEQ ID NO: 86662 - protein, 9 aa, synthetic construct
  source 1..9: note = Seed: VVVGAGDVG (KRAS G13D)
FVVSAMDVG

SEQ ID NO: 86663 - protein, 9 aa, synthetic construct
  source 1..9: note = Seed: VVVGAGDVG (KRAS G13D)
FVVSAMDVS

SEQ ID NO: 86664 - protein, 9 aa, synthetic construct
  source 1..9: note = Seed: VVVGAGDVG (KRAS G13D)
FVVSANDVA

SEQ ID NO: 86665 - protein, 9 aa, synthetic construct
  source 1..9: note = Seed: VVVGAGDVG (KRAS G13D)
FVVSANDVC

SEQ ID NO: 86666 - protein, 9 aa, synthetic construct
  source 1..9: note = Seed: VVVGAGDVG (KRAS G13D)
FVVSANDVD

SEQ ID NO: 86667 - protein, 9 aa, synthetic construct
  source 1..9: note = Seed: VVVGAGDVG (KRAS G13D)
FVVSANDVE

SEQ ID NO: 86668 - protein, 9 aa, synthetic construct
  source 1..9: note = Seed: VVVGAGDVG (KRAS G13D)
FVVSANDVF

SEQ ID NO: 86669 - protein, 9 aa, synthetic construct
  source 1..9: note = Seed: VVVGAGDVG (KRAS G13D)
FVVSANDVG

SEQ ID NO: 86670 - protein, 9 aa, synthetic construct
  source 1..9: note = Seed: VVVGAGDVG (KRAS G13D)
FVVSANDVH

SEQ ID NO: 86671 - protein, 9 aa, synthetic construct
  source 1..9: note = Seed: VVVGAGDVG (KRAS G13D)
FVVSANDVI

SEQ ID NO: 86672 - protein, 9 aa, synthetic construct
  source 1..9: note = Seed: VVVGAGDVG (KRAS G13D)
FVVSANDVK

SEQ ID NO: 86673 - protein, 9 aa, synthetic construct
  source 1..9: note = Seed: VVVGAGDVG (KRAS G13D)
FVVSANDVL

SEQ ID NO: 86674 - protein, 9 aa, synthetic construct
  source 1..9: note = Seed: VVVGAGDVG (KRAS G13D)
FVVSANDVM

SEQ ID NO: 86675 - protein, 9 aa, synthetic construct
  source 1..9: note = Seed: VVVGAGDVG (KRAS G13D)
FVVSANDVN

SEQ ID NO: 86676 - protein, 9 aa, synthetic construct
  source 1..9: note = Seed: VVVGAGDVG (KRAS G13D)
FVVSANDVP

SEQ ID NO: 86677 - protein, 9 aa, synthetic construct
  source 1..9: note = Seed: VVVGAGDVG (KRAS G13D)
FVVSANDVQ

SEQ ID NO: 86678 - protein, 9 aa, synthetic construct
  source 1..9: note = Seed: VVVGAGDVG (KRAS G13D)
FVVSANDVR

SEQ ID NO: 86679 - protein, 9 aa, synthetic construct
  source 1..9: note = Seed: VVVGAGDVG (KRAS G13D)
FVVSANDVS

SEQ ID NO: 86680 - protein, 9 aa, synthetic construct
  source 1..9: note = Seed: VVVGAGDVG (KRAS G13D)
FVVSANDVT

SEQ ID NO: 86681 - protein, 9 aa, synthetic construct
  source 1..9: note = Seed: VVVGAGDVG (KRAS G13D)
FVVSANDVV

SEQ ID NO: 86682 - protein, 9 aa, synthetic construct
  source 1..9: note = Seed: VVVGAGDVG (KRAS G13D)
FVVSANDVY

SEQ ID NO: 86683 - protein, 9 aa, synthetic construct
  source 1..9: note = Seed: VVVGAGDVG (KRAS G13D)
FVVSAPDVA

SEQ ID NO: 86684 - protein, 9 aa, synthetic construct
  source 1..9: note = Seed: VVVGAGDVG (KRAS G13D)
FVVSAPDVC

SEQ ID NO: 86685 - protein, 9 aa, synthetic construct
  source 1..9: note = Seed: VVVGAGDVG (KRAS G13D)
FVVSAPDVD

SEQ ID NO: 86686 - protein, 9 aa, synthetic construct
  source 1..9: note = Seed: VVVGAGDVG (KRAS G13D)
FVVSAPDVE

SEQ ID NO: 86687 - protein, 9 aa, synthetic construct
  source 1..9: note = Seed: VVVGAGDVG (KRAS G13D)
FVVSAPDVF

SEQ ID NO: 86688 - protein, 9 aa, synthetic construct
  source 1..9: note = Seed: VVVGAGDVG (KRAS G13D)
FVVSAPDVG

SEQ ID NO: 86689 - protein, 9 aa, synthetic construct
  source 1..9: note = Seed: VVVGAGDVG (KRAS G13D)
FVVSAPDVH

SEQ ID NO: 86690 - protein, 9 aa, synthetic construct
  source 1..9: note = Seed: VVVGAGDVG (KRAS G13D)
FVVSAPDVI

SEQ ID NO: 86691 - protein, 9 aa, synthetic construct
  source 1..9: note = Seed: VVVGAGDVG (KRAS G13D)
FVVSAPDVK

SEQ ID NO: 86692 - protein, 9 aa, synthetic construct
  source 1..9: note = Seed: VVVGAGDVG (KRAS G13D)
FVVSAPDVL

SEQ ID NO: 86693 - protein, 9 aa, synthetic construct
  source 1..9: note = Seed: VVVGAGDVG (KRAS G13D)
FVVSAPDVM

SEQ ID NO: 86694 - protein, 9 aa, synthetic construct
  source 1..9: note = Seed: VVVGAGDVG (KRAS G13D)
FVVSAPDVN

SEQ ID NO: 86695 - protein, 9 aa, synthetic construct
  source 1..9: note = Seed: VVVGAGDVG (KRAS G13D)
FVVSAPDVP

SEQ ID NO: 86696 - protein, 9 aa, synthetic construct
  source 1..9: note = Seed: VVVGAGDVG (KRAS G13D)
FVVSAPDVQ

SEQ ID NO: 86697 - protein, 9 aa, synthetic construct
  source 1..9: note = Seed: VVVGAGDVG (KRAS G13D)
FVVSAPDVR

SEQ ID NO: 86698 - protein, 9 aa, synthetic construct
  source 1..9: note = Seed: VVVGAGDVG (KRAS G13D)
FVVSAPDVS

SEQ ID NO: 86699 - protein, 9 aa, synthetic construct
  source 1..9: note = Seed: VVVGAGDVG (KRAS G13D)
FVVSAPDVT

SEQ ID NO: 86700 - protein, 9 aa, synthetic construct
  source 1..9: note = Seed: VVVGAGDVG (KRAS G13D)
FVVSAPDVV

SEQ ID NO: 86701 - protein, 9 aa, synthetic construct
  source 1..9: note = Seed: VVVGAGDVG (KRAS G13D)
FVVSAPDVW

SEQ ID NO: 86702 - protein, 9 aa, synthetic construct
  source 1..9: note = Seed: VVVGAGDVG (KRAS G13D)
FVVSAPDVY

SEQ ID NO: 86703 - protein, 9 aa, synthetic construct
  source 1..9: note = Seed: VVVGAGDVG (KRAS G13D)
FVVSAQDVA

SEQ ID NO: 86704 - protein, 9 aa, synthetic construct
  source 1..9: note = Seed: VVVGAGDVG (KRAS G13D)
FVVSAQDVG

SEQ ID NO: 86705 - protein, 9 aa, synthetic construct
  source 1..9: note = Seed: VVVGAGDVG (KRAS G13D)
FVVSAQDVM

SEQ ID NO: 86706 - protein, 9 aa, synthetic construct
  source 1..9: note = Seed: VVVGAGDVG (KRAS G13D)
FVVSAQDVN

SEQ ID NO: 86707 - protein, 9 aa, synthetic construct
  source 1..9: note = Seed: VVVGAGDVG (KRAS G13D)
FVVSAQDVQ

SEQ ID NO: 86708 - protein, 9 aa, synthetic construct
  source 1..9: note = Seed: VVVGAGDVG (KRAS G13D)
FVVSAQDVS

SEQ ID NO: 86709 - protein, 9 aa, synthetic construct
  source 1..9: note = Seed: VVVGAGDVG (KRAS G13D)
FVVSAQDVT

SEQ ID NO: 86710 - protein, 9 aa, synthetic construct
  source 1..9: note = Seed: VVVGAGDVG (KRAS G13D)
FVVSAQDVV

SEQ ID NO: 86711 - protein, 9 aa, synthetic construct
  source 1..9: note = Seed: VVVGAGDVG (KRAS G13D)
FVVSARDVA

SEQ ID NO: 86712 - protein, 9 aa, synthetic construct
  source 1..9: note = Seed: VVVGAGDVG (KRAS G13D)
FVVSARDVL

SEQ ID NO: 86713 - protein, 9 aa, synthetic construct
  source 1..9: note = Seed: VVVGAGDVG (KRAS G13D)
FVVSARDVN

SEQ ID NO: 86714 - protein, 9 aa, synthetic construct
  source 1..9: note = Seed: VVVGAGDVG (KRAS G13D)
FVVSARDVS

SEQ ID NO: 86715 - protein, 9 aa, synthetic construct
  source 1..9: note = Seed: VVVGAGDVG (KRAS G13D)
FVVSARDVV

SEQ ID NO: 86716 - protein, 9 aa, synthetic construct
  source 1..9: note = Seed: VVVGAGDVG (KRAS G13D)
FVVSASDVA

SEQ ID NO: 86717 - protein, 9 aa, synthetic construct
  source 1..9: note = Seed: VVVGAGDVG (KRAS G13D)
FVVSASDVC

SEQ ID NO: 86718 - protein, 9 aa, synthetic construct
  source 1..9: note = Seed: VVVGAGDVG (KRAS G13D)
FVVSASDVD

SEQ ID NO: 86719 - protein, 9 aa, synthetic construct
  source 1..9: note = Seed: VVVGAGDVG (KRAS G13D)
FVVSASDVE

SEQ ID NO: 86720 - protein, 9 aa, synthetic construct
  source 1..9: note = Seed: VVVGAGDVG (KRAS G13D)
FVVSASDVF

SEQ ID NO: 86721 - protein, 9 aa, synthetic construct
  source 1..9: note = Seed: VVVGAGDVG (KRAS G13D)
FVVSASDVG

SEQ ID NO: 86722 - protein, 9 aa, synthetic construct
  source 1..9: note = Seed: VVVGAGDVG (KRAS G13D)
FVVSASDVH

SEQ ID NO: 86723 - protein, 9 aa, synthetic construct
  source 1..9: note = Seed: VVVGAGDVG (KRAS G13D)
FVVSASDVI

SEQ ID NO: 86724 - protein, 9 aa, synthetic construct
  source 1..9: note = Seed: VVVGAGDVG (KRAS G13D)
FVVSASDVK

SEQ ID NO: 86725 - protein, 9 aa, synthetic construct
  source 1..9: note = Seed: VVVGAGDVG (KRAS G13D)
FVVSASDVL

SEQ ID NO: 86726 - protein, 9 aa, synthetic construct
  source 1..9: note = Seed: VVVGAGDVG (KRAS G13D)
FVVSASDVM

SEQ ID NO: 86727 - protein, 9 aa, synthetic construct
  source 1..9: note = Seed: VVVGAGDVG (KRAS G13D)
FVVSASDVN

SEQ ID NO: 86728 - protein, 9 aa, synthetic construct
  source 1..9: note = Seed: VVVGAGDVG (KRAS G13D)
FVVSASDVP

SEQ ID NO: 86729 - protein, 9 aa, synthetic construct
  source 1..9: note = Seed: VVVGAGDVG (KRAS G13D)
FVVSASDVQ

SEQ ID NO: 86730 - protein, 9 aa, synthetic construct
  source 1..9: note = Seed: VVVGAGDVG (KRAS G13D)
FVVSASDVR

SEQ ID NO: 86731 - protein, 9 aa, synthetic construct
  source 1..9: note = Seed: VVVGAGDVG (KRAS G13D)
FVVSASDVS

SEQ ID NO: 86732 - protein, 9 aa, synthetic construct
  source 1..9: note = Seed: VVVGAGDVG (KRAS G13D)
FVVSASDVT

SEQ ID NO: 86733 - protein, 9 aa, synthetic construct
  source 1..9: note = Seed: VVVGAGDVG (KRAS G13D)
FVVSASDVV

SEQ ID NO: 86734 - protein, 9 aa, synthetic construct
  source 1..9: note = Seed: VVVGAGDVG (KRAS G13D)
FVVSASDVW

SEQ ID NO: 86735 - protein, 9 aa, synthetic construct
  source 1..9: note = Seed: VVVGAGDVG (KRAS G13D)
FVVSASDVY

SEQ ID NO: 86736 - protein, 9 aa, synthetic construct
  source 1..9: note = Seed: VVVGAGDVG (KRAS G13D)
FVVSATDVA

SEQ ID NO: 86737 - protein, 9 aa, synthetic construct
  source 1..9: note = Seed: VVVGAGDVG (KRAS G13D)
FVVSATDVC

SEQ ID NO: 86738 - protein, 9 aa, synthetic construct
  source 1..9: note = Seed: VVVGAGDVG (KRAS G13D)
FVVSATDVD

SEQ ID NO: 86739 - protein, 9 aa, synthetic construct
  source 1..9: note = Seed: VVVGAGDVG (KRAS G13D)
FVVSATDVE

SEQ ID NO: 86740 - protein, 9 aa, synthetic construct
  source 1..9: note = Seed: VVVGAGDVG (KRAS G13D)
FVVSATDVF

SEQ ID NO: 86741 - protein, 9 aa, synthetic construct
  source 1..9: note = Seed: VVVGAGDVG (KRAS G13D)
FVVSATDVG

SEQ ID NO: 86742 - protein, 9 aa, synthetic construct
  source 1..9: note = Seed: VVVGAGDVG (KRAS G13D)
FVVSATDVH

SEQ ID NO: 86743 - protein, 9 aa, synthetic construct
  source 1..9: note = Seed: VVVGAGDVG (KRAS G13D)
FVVSATDVI

SEQ ID NO: 86744 - protein, 9 aa, synthetic construct
  source 1..9: note = Seed: VVVGAGDVG (KRAS G13D)
FVVSATDVK

SEQ ID NO: 86745 - protein, 9 aa, synthetic construct
  source 1..9: note = Seed: VVVGAGDVG (KRAS G13D)
FVVSATDVL

SEQ ID NO: 86746 - protein, 9 aa, synthetic construct
  source 1..9: note = Seed: VVVGAGDVG (KRAS G13D)
FVVSATDVM

SEQ ID NO: 86747 - protein, 9 aa, synthetic construct
  source 1..9: note = Seed: VVVGAGDVG (KRAS G13D)
FVVSATDVN

SEQ ID NO: 86748 - protein, 9 aa, synthetic construct
  source 1..9: note = Seed: VVVGAGDVG (KRAS G13D)
FVVSATDVP

SEQ ID NO: 86749 - protein, 9 aa, synthetic construct
  source 1..9: note = Seed: VVVGAGDVG (KRAS G13D)
FVVSATDVQ

SEQ ID NO: 86750 - protein, 9 aa, synthetic construct
  source 1..9: note = Seed: VVVGAGDVG (KRAS G13D)
FVVSATDVR

SEQ ID NO: 86751 - protein, 9 aa, synthetic construct
  source 1..9: note = Seed: VVVGAGDVG (KRAS G13D)
FVVSATDVS

SEQ ID NO: 86752 - protein, 9 aa, synthetic construct
  source 1..9: note = Seed: VVVGAGDVG (KRAS G13D)
FVVSATDVT

SEQ ID NO: 86753 - protein, 9 aa, synthetic construct
  source 1..9: note = Seed: VVVGAGDVG (KRAS G13D)
FVVSATDVV

SEQ ID NO: 86754 - protein, 9 aa, synthetic construct
  source 1..9: note = Seed: VVVGAGDVG (KRAS G13D)
FVVSATDVW

SEQ ID NO: 86755 - protein, 9 aa, synthetic construct
  source 1..9: note = Seed: VVVGAGDVG (KRAS G13D)
FVVSATDVY

SEQ ID NO: 86756 - protein, 9 aa, synthetic construct
  source 1..9: note = Seed: VVVGAGDVG (KRAS G13D)
FVVSAVDVA

SEQ ID NO: 86757 - protein, 9 aa, synthetic construct
  source 1..9: note = Seed: VVVGAGDVG (KRAS G13D)
FVVSAVDVD

SEQ ID NO: 86758 - protein, 9 aa, synthetic construct
  source 1..9: note = Seed: VVVGAGDVG (KRAS G13D)
FVVSAVDVE

SEQ ID NO: 86759 - protein, 9 aa, synthetic construct
  source 1..9: note = Seed: VVVGAGDVG (KRAS G13D)
FVVSAVDVF

SEQ ID NO: 86760 - protein, 9 aa, synthetic construct
  source 1..9: note = Seed: VVVGAGDVG (KRAS G13D)
FVVSAVDVG

SEQ ID NO: 86761 - protein, 9 aa, synthetic construct
  source 1..9: note = Seed: VVVGAGDVG (KRAS G13D)
FVVSAVDVH

SEQ ID NO: 86762 - protein, 9 aa, synthetic construct
  source 1..9: note = Seed: VVVGAGDVG (KRAS G13D)
FVVSAVDVI

SEQ ID NO: 86763 - protein, 9 aa, synthetic construct
  source 1..9: note = Seed: VVVGAGDVG (KRAS G13D)
FVVSAVDVK

SEQ ID NO: 86764 - protein, 9 aa, synthetic construct
  source 1..9: note = Seed: VVVGAGDVG (KRAS G13D)
FVVSAVDVL

SEQ ID NO: 86765 - protein, 9 aa, synthetic construct
  source 1..9: note = Seed: VVVGAGDVG (KRAS G13D)
FVVSAVDVM

SEQ ID NO: 86766 - protein, 9 aa, synthetic construct
  source 1..9: note = Seed: VVVGAGDVG (KRAS G13D)
FVVSAVDVN

SEQ ID NO: 86767 - protein, 9 aa, synthetic construct
  source 1..9: note = Seed: VVVGAGDVG (KRAS G13D)
FVVSAVDVP

SEQ ID NO: 86768 - protein, 9 aa, synthetic construct
  source 1..9: note = Seed: VVVGAGDVG (KRAS G13D)
FVVSAVDVQ

SEQ ID NO: 86769 - protein, 9 aa, synthetic construct
  source 1..9: note = Seed: VVVGAGDVG (KRAS G13D)
FVVSAVDVR

SEQ ID NO: 86770 - protein, 9 aa, synthetic construct
  source 1..9: note = Seed: VVVGAGDVG (KRAS G13D)
FVVSAVDVS

SEQ ID NO: 86771 - protein, 9 aa, synthetic construct
  source 1..9: note = Seed: VVVGAGDVG (KRAS G13D)
FVVSAVDVT

SEQ ID NO: 86772 - protein, 9 aa, synthetic construct
  source 1..9: note = Seed: VVVGAGDVG (KRAS G13D)
FVVSAVDVV

SEQ ID NO: 86773 - protein, 9 aa, synthetic construct
  source 1..9: note = Seed: VVVGAGDVG (KRAS G13D)
FVVSAVDVY

SEQ ID NO: 86774 - protein, 9 aa, synthetic construct
  source 1..9: note = Seed: VVVGAGDVG (KRAS G13D)
FVVSAYDVA

SEQ ID NO: 86775 - protein, 9 aa, synthetic construct
  source 1..9: note = Seed: VVVGAGDVG (KRAS G13D)
FVVSAYDVN

SEQ ID NO: 86776 - protein, 9 aa, synthetic construct
  source 1..9: note = Seed: VVVGAGDVG (KRAS G13D)
FVVTAADVA

SEQ ID NO: 86777 - protein, 9 aa, synthetic construct
  source 1..9: note = Seed: VVVGAGDVG (KRAS G13D)
FVVTAADVC

SEQ ID NO: 86778 - protein, 9 aa, synthetic construct
  source 1..9: note = Seed: VVVGAGDVG (KRAS G13D)
FVVTAADVD

SEQ ID NO: 86779 - protein, 9 aa, synthetic construct
  source 1..9: note = Seed: VVVGAGDVG (KRAS G13D)
FVVTAADVE

SEQ ID NO: 86780 - protein, 9 aa, synthetic construct
  source 1..9: note = Seed: VVVGAGDVG (KRAS G13D)
FVVTAADVF

SEQ ID NO: 86781 - protein, 9 aa, synthetic construct
  source 1..9: note = Seed: VVVGAGDVG (KRAS G13D)
FVVTAADVG

SEQ ID NO: 86782 - protein, 9 aa, synthetic construct
  source 1..9: note = Seed: VVVGAGDVG (KRAS G13D)
FVVTAADVH

SEQ ID NO: 86783 - protein, 9 aa, synthetic construct
  source 1..9: note = Seed: VVVGAGDVG (KRAS G13D)
FVVTAADVI

SEQ ID NO: 86784 - protein, 9 aa, synthetic construct
  source 1..9: note = Seed: VVVGAGDVG (KRAS G13D)
FVVTAADVK

SEQ ID NO: 86785 - protein, 9 aa, synthetic construct
  source 1..9: note = Seed: VVVGAGDVG (KRAS G13D)
FVVTAADVL

SEQ ID NO: 86786 - protein, 9 aa, synthetic construct
  source 1..9: note = Seed: VVVGAGDVG (KRAS G13D)
FVVTAADVM

SEQ ID NO: 86787 - protein, 9 aa, synthetic construct
  source 1..9: note = Seed: VVVGAGDVG (KRAS G13D)
FVVTAADVN

SEQ ID NO: 86788 - protein, 9 aa, synthetic construct
  source 1..9: note = Seed: VVVGAGDVG (KRAS G13D)
FVVTAADVP

SEQ ID NO: 86789 - protein, 9 aa, synthetic construct
  source 1..9: note = Seed: VVVGAGDVG (KRAS G13D)
FVVTAADVQ

SEQ ID NO: 86790 - protein, 9 aa, synthetic construct
  source 1..9: note = Seed: VVVGAGDVG (KRAS G13D)
FVVTAADVR

SEQ ID NO: 86791 - protein, 9 aa, synthetic construct
  source 1..9: note = Seed: VVVGAGDVG (KRAS G13D)
FVVTAADVS

SEQ ID NO: 86792 - protein, 9 aa, synthetic construct
  source 1..9: note = Seed: VVVGAGDVG (KRAS G13D)
FVVTAADVT

SEQ ID NO: 86793 - protein, 9 aa, synthetic construct
  source 1..9: note = Seed: VVVGAGDVG (KRAS G13D)
FVVTAADVV

SEQ ID NO: 86794 - protein, 9 aa, synthetic construct
  source 1..9: note = Seed: VVVGAGDVG (KRAS G13D)
FVVTAADVW

SEQ ID NO: 86795 - protein, 9 aa, synthetic construct
  source 1..9: note = Seed: VVVGAGDVG (KRAS G13D)
FVVTAADVY

SEQ ID NO: 86796 - protein, 9 aa, synthetic construct
  source 1..9: note = Seed: VVVGAGDVG (KRAS G13D)
FVVTADDVA

SEQ ID NO: 86797 - protein, 9 aa, synthetic construct
  source 1..9: note = Seed: VVVGAGDVG (KRAS G13D)
FVVTADDVS

SEQ ID NO: 86798 - protein, 9 aa, synthetic construct
  source 1..9: note = Seed: VVVGAGDVG (KRAS G13D)
FVVTAEDVA

SEQ ID NO: 86799 - protein, 9 aa, synthetic construct
  source 1..9: note = Seed: VVVGAGDVG (KRAS G13D)
FVVTAEDVH

SEQ ID NO: 86800 - protein, 9 aa, synthetic construct
  source 1..9: note = Seed: VVVGAGDVG (KRAS G13D)
FVVTAEDVI

SEQ ID NO: 86801 - protein, 9 aa, synthetic construct
  source 1..9: note = Seed: VVVGAGDVG (KRAS G13D)
FVVTAEDVL

SEQ ID NO: 86802 - protein, 9 aa, synthetic construct
  source 1..9: note = Seed: VVVGAGDVG (KRAS G13D)
FVVTAEDVM

SEQ ID NO: 86803 - protein, 9 aa, synthetic construct
  source 1..9: note = Seed: VVVGAGDVG (KRAS G13D)
FVVTAEDVN

SEQ ID NO: 86804 - protein, 9 aa, synthetic construct
  source 1..9: note = Seed: VVVGAGDVG (KRAS G13D)
FVVTAEDVS

SEQ ID NO: 86805 - protein, 9 aa, synthetic construct
  source 1..9: note = Seed: VVVGAGDVG (KRAS G13D)
FVVTAEDVV

SEQ ID NO: 86806 - protein, 9 aa, synthetic construct
  source 1..9: note = Seed: VVVGAGDVG (KRAS G13D)
FVVTAGDVA

SEQ ID NO: 86807 - protein, 9 aa, synthetic construct
  source 1..9: note = Seed: VVVGAGDVG (KRAS G13D)
FVVTAGDVG

SEQ ID NO: 86808 - protein, 9 aa, synthetic construct
  source 1..9: note = Seed: VVVGAGDVG (KRAS G13D)
FVVTAGDVH

SEQ ID NO: 86809 - protein, 9 aa, synthetic construct
  source 1..9: note = Seed: VVVGAGDVG (KRAS G13D)
FVVTAGDVI

SEQ ID NO: 86810 - protein, 9 aa, synthetic construct
  source 1..9: note = Seed: VVVGAGDVG (KRAS G13D)
FVVTAGDVK

SEQ ID NO: 86811 - protein, 9 aa, synthetic construct
  source 1..9: note = Seed: VVVGAGDVG (KRAS G13D)
FVVTAGDVL

SEQ ID NO: 86812 - protein, 9 aa, synthetic construct
  source 1..9: note = Seed: VVVGAGDVG (KRAS G13D)
FVVTAGDVM

SEQ ID NO: 86813 - protein, 9 aa, synthetic construct
  source 1..9: note = Seed: VVVGAGDVG (KRAS G13D)
FVVTAGDVN

SEQ ID NO: 86814 - protein, 9 aa, synthetic construct
  source 1..9: note = Seed: VVVGAGDVG (KRAS G13D)
FVVTAGDVP

SEQ ID NO: 86815 - protein, 9 aa, synthetic construct
  source 1..9: note = Seed: VVVGAGDVG (KRAS G13D)
FVVTAGDVQ

SEQ ID NO: 86816 - protein, 9 aa, synthetic construct
  source 1..9: note = Seed: VVVGAGDVG (KRAS G13D)
FVVTAGDVR

SEQ ID NO: 86817 - protein, 9 aa, synthetic construct
  source 1..9: note = Seed: VVVGAGDVG (KRAS G13D)
FVVTAGDVS

SEQ ID NO: 86818 - protein, 9 aa, synthetic construct
  source 1..9: note = Seed: VVVGAGDVG (KRAS G13D)
FVVTAGDVT

SEQ ID NO: 86819 - protein, 9 aa, synthetic construct
  source 1..9: note = Seed: VVVGAGDVG (KRAS G13D)
FVVTAGDVV

SEQ ID NO: 86820 - protein, 9 aa, synthetic construct
  source 1..9: note = Seed: VVVGAGDVG (KRAS G13D)
FVVTAGDVY

SEQ ID NO: 86821 - protein, 9 aa, synthetic construct
  source 1..9: note = Seed: VVVGAGDVG (KRAS G13D)
FVVTAHDVA

SEQ ID NO: 86822 - protein, 9 aa, synthetic construct
  source 1..9: note = Seed: VVVGAGDVG (KRAS G13D)
FVVTAHDVG

SEQ ID NO: 86823 - protein, 9 aa, synthetic construct
  source 1..9: note = Seed: VVVGAGDVG (KRAS G13D)
FVVTAHDVI

SEQ ID NO: 86824 - protein, 9 aa, synthetic construct
  source 1..9: note = Seed: VVVGAGDVG (KRAS G13D)
FVVTAHDVL

SEQ ID NO: 86825 - protein, 9 aa, synthetic construct
  source 1..9: note = Seed: VVVGAGDVG (KRAS G13D)
FVVTAHDVM

SEQ ID NO: 86826 - protein, 9 aa, synthetic construct
  source 1..9: note = Seed: VVVGAGDVG (KRAS G13D)
FVVTAHDVN

SEQ ID NO: 86827 - protein, 9 aa, synthetic construct
  source 1..9: note = Seed: VVVGAGDVG (KRAS G13D)
FVVTAHDVQ

SEQ ID NO: 86828 - protein, 9 aa, synthetic construct
  source 1..9: note = Seed: VVVGAGDVG (KRAS G13D)
FVVTAHDVS

SEQ ID NO: 86829 - protein, 9 aa, synthetic construct
  source 1..9: note = Seed: VVVGAGDVG (KRAS G13D)
FVVTAHDVT

SEQ ID NO: 86830 - protein, 9 aa, synthetic construct
  source 1..9: note = Seed: VVVGAGDVG (KRAS G13D)
FVVTAHDVV

SEQ ID NO: 86831 - protein, 9 aa, synthetic construct
  source 1..9: note = Seed: VVVGAGDVG (KRAS G13D)
FVVTAIDVA

SEQ ID NO: 86832 - protein, 9 aa, synthetic construct
  source 1..9: note = Seed: VVVGAGDVG (KRAS G13D)
FVVTAIDVD

SEQ ID NO: 86833 - protein, 9 aa, synthetic construct
  source 1..9: note = Seed: VVVGAGDVG (KRAS G13D)
FVVTAIDVG

SEQ ID NO: 86834 - protein, 9 aa, synthetic construct
  source 1..9: note = Seed: VVVGAGDVG (KRAS G13D)
FVVTAIDVH

SEQ ID NO: 86835 - protein, 9 aa, synthetic construct
  source 1..9: note = Seed: VVVGAGDVG (KRAS G13D)
FVVTAIDVI

SEQ ID NO: 86836 - protein, 9 aa, synthetic construct
  source 1..9: note = Seed: VVVGAGDVG (KRAS G13D)
FVVTAIDVL

SEQ ID NO: 86837 - protein, 9 aa, synthetic construct
  source 1..9: note = Seed: VVVGAGDVG (KRAS G13D)
FVVTAIDVM

SEQ ID NO: 86838 - protein, 9 aa, synthetic construct
  source 1..9: note = Seed: VVVGAGDVG (KRAS G13D)
FVVTAIDVN

SEQ ID NO: 86839 - protein, 9 aa, synthetic construct
  source 1..9: note = Seed: VVVGAGDVG (KRAS G13D)
FVVTAIDVQ

SEQ ID NO: 86840 - protein, 9 aa, synthetic construct
  source 1..9: note = Seed: VVVGAGDVG (KRAS G13D)
FVVTAIDVS

SEQ ID NO: 86841 - protein, 9 aa, synthetic construct
  source 1..9: note = Seed: VVVGAGDVG (KRAS G13D)
FVVTAIDVT

SEQ ID NO: 86842 - protein, 9 aa, synthetic construct
  source 1..9: note = Seed: VVVGAGDVG (KRAS G13D)
FVVTAIDVV

SEQ ID NO: 86843 - protein, 9 aa, synthetic construct
  source 1..9: note = Seed: VVVGAGDVG (KRAS G13D)
FVVTALDVC

SEQ ID NO: 86844 - protein, 9 aa, synthetic construct
  source 1..9: note = Seed: VVVGAGDVG (KRAS G13D)
FVVTALDVG

SEQ ID NO: 86845 - protein, 9 aa, synthetic construct
  source 1..9: note = Seed: VVVGAGDVG (KRAS G13D)
FVVTAMDVG

SEQ ID NO: 86846 - protein, 9 aa, synthetic construct
  source 1..9: note = Seed: VVVGAGDVG (KRAS G13D)
FVVTANDVA

SEQ ID NO: 86847 - protein, 9 aa, synthetic construct
  source 1..9: note = Seed: VVVGAGDVG (KRAS G13D)
FVVTANDVC

SEQ ID NO: 86848 - protein, 9 aa, synthetic construct
  source 1..9: note = Seed: VVVGAGDVG (KRAS G13D)
FVVTANDVD

SEQ ID NO: 86849 - protein, 9 aa, synthetic construct
  source 1..9: note = Seed: VVVGAGDVG (KRAS G13D)
FVVTANDVE

SEQ ID NO: 86850 - protein, 9 aa, synthetic construct
  source 1..9: note = Seed: VVVGAGDVG (KRAS G13D)
FVVTANDVG

SEQ ID NO: 86851 - protein, 9 aa, synthetic construct
  source 1..9: note = Seed: VVVGAGDVG (KRAS G13D)
FVVTANDVH

SEQ ID NO: 86852 - protein, 9 aa, synthetic construct
  source 1..9: note = Seed: VVVGAGDVG (KRAS G13D)
FVVTANDVI

SEQ ID NO: 86853 - protein, 9 aa, synthetic construct
  source 1..9: note = Seed: VVVGAGDVG (KRAS G13D)
FVVTANDVL

SEQ ID NO: 86854 - protein, 9 aa, synthetic construct
  source 1..9: note = Seed: VVVGAGDVG (KRAS G13D)
FVVTANDVM

SEQ ID NO: 86855 - protein, 9 aa, synthetic construct
  source 1..9: note = Seed: VVVGAGDVG (KRAS G13D)
FVVTANDVN

SEQ ID NO: 86856 - protein, 9 aa, synthetic construct
  source 1..9: note = Seed: VVVGAGDVG (KRAS G13D)
FVVTANDVP

SEQ ID NO: 86857 - protein, 9 aa, synthetic construct
  source 1..9: note = Seed: VVVGAGDVG (KRAS G13D)
FVVTANDVQ

SEQ ID NO: 86858 - protein, 9 aa, synthetic construct
  source 1..9: note = Seed: VVVGAGDVG (KRAS G13D)
FVVTANDVS

SEQ ID NO: 86859 - protein, 9 aa, synthetic construct
  source 1..9: note = Seed: VVVGAGDVG (KRAS G13D)
FVVTANDVT

SEQ ID NO: 86860 - protein, 9 aa, synthetic construct
  source 1..9: note = Seed: VVVGAGDVG (KRAS G13D)
FVVTANDVV

SEQ ID NO: 86861 - protein, 9 aa, synthetic construct
  source 1..9: note = Seed: VVVGAGDVG (KRAS G13D)
FVVTANDVY

SEQ ID NO: 86862 - protein, 9 aa, synthetic construct
  source 1..9: note = Seed: VVVGAGDVG (KRAS G13D)
FVVTAPDVA

SEQ ID NO: 86863 - protein, 9 aa, synthetic construct
  source 1..9: note = Seed: VVVGAGDVG (KRAS G13D)
FVVTAPDVC

SEQ ID NO: 86864 - protein, 9 aa, synthetic construct
  source 1..9: note = Seed: VVVGAGDVG (KRAS G13D)
FVVTAPDVD

SEQ ID NO: 86865 - protein, 9 aa, synthetic construct
  source 1..9: note = Seed: VVVGAGDVG (KRAS G13D)
FVVTAPDVE

SEQ ID NO: 86866 - protein, 9 aa, synthetic construct
  source 1..9: note = Seed: VVVGAGDVG (KRAS G13D)
FVVTAPDVF

SEQ ID NO: 86867 - protein, 9 aa, synthetic construct
  source 1..9: note = Seed: VVVGAGDVG (KRAS G13D)
FVVTAPDVG

SEQ ID NO: 86868 - protein, 9 aa, synthetic construct
  source 1..9: note = Seed: VVVGAGDVG (KRAS G13D)
FVVTAPDVH

SEQ ID NO: 86869 - protein, 9 aa, synthetic construct
  source 1..9: note = Seed: VVVGAGDVG (KRAS G13D)
FVVTAPDVI

SEQ ID NO: 86870 - protein, 9 aa, synthetic construct
  source 1..9: note = Seed: VVVGAGDVG (KRAS G13D)
FVVTAPDVK

SEQ ID NO: 86871 - protein, 9 aa, synthetic construct
  source 1..9: note = Seed: VVVGAGDVG (KRAS G13D)
FVVTAPDVL

SEQ ID NO: 86872 - protein, 9 aa, synthetic construct
  source 1..9: note = Seed: VVVGAGDVG (KRAS G13D)
FVVTAPDVM

SEQ ID NO: 86873 - protein, 9 aa, synthetic construct
  source 1..9: note = Seed: VVVGAGDVG (KRAS G13D)
FVVTAPDVN

SEQ ID NO: 86874 - protein, 9 aa, synthetic construct
  source 1..9: note = Seed: VVVGAGDVG (KRAS G13D)
FVVTAPDVP

SEQ ID NO: 86875 - protein, 9 aa, synthetic construct
  source 1..9: note = Seed: VVVGAGDVG (KRAS G13D)
FVVTAPDVQ

SEQ ID NO: 86876 - protein, 9 aa, synthetic construct
  source 1..9: note = Seed: VVVGAGDVG (KRAS G13D)
FVVTAPDVR

SEQ ID NO: 86877 - protein, 9 aa, synthetic construct
  source 1..9: note = Seed: VVVGAGDVG (KRAS G13D)
FVVTAPDVS

SEQ ID NO: 86878 - protein, 9 aa, synthetic construct
  source 1..9: note = Seed: VVVGAGDVG (KRAS G13D)
FVVTAPDVT

SEQ ID NO: 86879 - protein, 9 aa, synthetic construct
  source 1..9: note = Seed: VVVGAGDVG (KRAS G13D)
FVVTAPDVV

SEQ ID NO: 86880 - protein, 9 aa, synthetic construct
  source 1..9: note = Seed: VVVGAGDVG (KRAS G13D)
FVVTAPDVW

SEQ ID NO: 86881 - protein, 9 aa, synthetic construct
  source 1..9: note = Seed: VVVGAGDVG (KRAS G13D)
FVVTAPDVY

SEQ ID NO: 86882 - protein, 9 aa, synthetic construct
  source 1..9: note = Seed: VVVGAGDVG (KRAS G13D)
FVVTAQDVA

SEQ ID NO: 86883 - protein, 9 aa, synthetic construct
  source 1..9: note = Seed: VVVGAGDVG (KRAS G13D)
FVVTAQDVM

SEQ ID NO: 86884 - protein, 9 aa, synthetic construct
  source 1..9: note = Seed: VVVGAGDVG (KRAS G13D)
FVVTAQDVN

SEQ ID NO: 86885 - protein, 9 aa, synthetic construct
  source 1..9: note = Seed: VVVGAGDVG (KRAS G13D)
FVVTAQDVQ

SEQ ID NO: 86886 - protein, 9 aa, synthetic construct
  source 1..9: note = Seed: VVVGAGDVG (KRAS G13D)
FVVTAQDVS

SEQ ID NO: 86887 - protein, 9 aa, synthetic construct
  source 1..9: note = Seed: VVVGAGDVG (KRAS G13D)
FVVTAQDVT

SEQ ID NO: 86888 - protein, 9 aa, synthetic construct
  source 1..9: note = Seed: VVVGAGDVG (KRAS G13D)
FVVTARDVA

SEQ ID NO: 86889 - protein, 9 aa, synthetic construct
  source 1..9: note = Seed: VVVGAGDVG (KRAS G13D)
FVVTARDVS

SEQ ID NO: 86890 - protein, 9 aa, synthetic construct
  source 1..9: note = Seed: VVVGAGDVG (KRAS G13D)
FVVTASDVA

SEQ ID NO: 86891 - protein, 9 aa, synthetic construct
  source 1..9: note = Seed: VVVGAGDVG (KRAS G13D)
FVVTASDVC

SEQ ID NO: 86892 - protein, 9 aa, synthetic construct
  source 1..9: note = Seed: VVVGAGDVG (KRAS G13D)
FVVTASDVD

SEQ ID NO: 86893 - protein, 9 aa, synthetic construct
  source 1..9: note = Seed: VVVGAGDVG (KRAS G13D)
FVVTASDVE

SEQ ID NO: 86894 - protein, 9 aa, synthetic construct
  source 1..9: note = Seed: VVVGAGDVG (KRAS G13D)
FVVTASDVF

SEQ ID NO: 86895 - protein, 9 aa, synthetic construct
  source 1..9: note = Seed: VVVGAGDVG (KRAS G13D)
FVVTASDVG

SEQ ID NO: 86896 - protein, 9 aa, synthetic construct
  source 1..9: note = Seed: VVVGAGDVG (KRAS G13D)
FVVTASDVH

SEQ ID NO: 86897 - protein, 9 aa, synthetic construct
  source 1..9: note = Seed: VVVGAGDVG (KRAS G13D)
FVVTASDVI

SEQ ID NO: 86898 - protein, 9 aa, synthetic construct
  source 1..9: note = Seed: VVVGAGDVG (KRAS G13D)
FVVTASDVK

SEQ ID NO: 86899 - protein, 9 aa, synthetic construct
  source 1..9: note = Seed: VVVGAGDVG (KRAS G13D)
FVVTASDVL

SEQ ID NO: 86900 - protein, 9 aa, synthetic construct
  source 1..9: note = Seed: VVVGAGDVG (KRAS G13D)
FVVTASDVM

SEQ ID NO: 86901 - protein, 9 aa, synthetic construct
  source 1..9: note = Seed: VVVGAGDVG (KRAS G13D)
FVVTASDVN

SEQ ID NO: 86902 - protein, 9 aa, synthetic construct
  source 1..9: note = Seed: VVVGAGDVG (KRAS G13D)
FVVTASDVP

SEQ ID NO: 86903 - protein, 9 aa, synthetic construct
  source 1..9: note = Seed: VVVGAGDVG (KRAS G13D)
FVVTASDVQ

SEQ ID NO: 86904 - protein, 9 aa, synthetic construct
  source 1..9: note = Seed: VVVGAGDVG (KRAS G13D)
FVVTASDVR

SEQ ID NO: 86905 - protein, 9 aa, synthetic construct
  source 1..9: note = Seed: VVVGAGDVG (KRAS G13D)
FVVTASDVS

SEQ ID NO: 86906 - protein, 9 aa, synthetic construct
  source 1..9: note = Seed: VVVGAGDVG (KRAS G13D)
FVVTASDVT

SEQ ID NO: 86907 - protein, 9 aa, synthetic construct
  source 1..9: note = Seed: VVVGAGDVG (KRAS G13D)
FVVTASDVV

SEQ ID NO: 86908 - protein, 9 aa, synthetic construct
  source 1..9: note = Seed: VVVGAGDVG (KRAS G13D)
FVVTASDVW

SEQ ID NO: 86909 - protein, 9 aa, synthetic construct
  source 1..9: note = Seed: VVVGAGDVG (KRAS G13D)
FVVTASDVY

SEQ ID NO: 86910 - protein, 9 aa, synthetic construct
  source 1..9: note = Seed: VVVGAGDVG (KRAS G13D)
FVVTATDVA

SEQ ID NO: 86911 - protein, 9 aa, synthetic construct
  source 1..9: note = Seed: VVVGAGDVG (KRAS G13D)
FVVTATDVC

SEQ ID NO: 86912 - protein, 9 aa, synthetic construct
  source 1..9: note = Seed: VVVGAGDVG (KRAS G13D)
FVVTATDVD

SEQ ID NO: 86913 - protein, 9 aa, synthetic construct
  source 1..9: note = Seed: VVVGAGDVG (KRAS G13D)
FVVTATDVE

SEQ ID NO: 86914 - protein, 9 aa, synthetic construct
  source 1..9: note = Seed: VVVGAGDVG (KRAS G13D)
FVVTATDVF

SEQ ID NO: 86915 - protein, 9 aa, synthetic construct
  source 1..9: note = Seed: VVVGAGDVG (KRAS G13D)
FVVTATDVG

SEQ ID NO: 86916 - protein, 9 aa, synthetic construct
  source 1..9: note = Seed: VVVGAGDVG (KRAS G13D)
FVVTATDVH

SEQ ID NO: 86917 - protein, 9 aa, synthetic construct
  source 1..9: note = Seed: VVVGAGDVG (KRAS G13D)
FVVTATDVI

SEQ ID NO: 86918 - protein, 9 aa, synthetic construct
  source 1..9: note = Seed: VVVGAGDVG (KRAS G13D)
FVVTATDVK

SEQ ID NO: 86919 - protein, 9 aa, synthetic construct
  source 1..9: note = Seed: VVVGAGDVG (KRAS G13D)
FVVTATDVL

SEQ ID NO: 86920 - protein, 9 aa, synthetic construct
  source 1..9: note = Seed: VVVGAGDVG (KRAS G13D)
FVVTATDVM

SEQ ID NO: 86921 - protein, 9 aa, synthetic construct
  source 1..9: note = Seed: VVVGAGDVG (KRAS G13D)
FVVTATDVN

SEQ ID NO: 86922 - protein, 9 aa, synthetic construct
  source 1..9: note = Seed: VVVGAGDVG (KRAS G13D)
FVVTATDVP

SEQ ID NO: 86923 - protein, 9 aa, synthetic construct
  source 1..9: note = Seed: VVVGAGDVG (KRAS G13D)
FVVTATDVQ

SEQ ID NO: 86924 - protein, 9 aa, synthetic construct
  source 1..9: note = Seed: VVVGAGDVG (KRAS G13D)
FVVTATDVR

SEQ ID NO: 86925 - protein, 9 aa, synthetic construct
  source 1..9: note = Seed: VVVGAGDVG (KRAS G13D)
FVVTATDVS

SEQ ID NO: 86926 - protein, 9 aa, synthetic construct
  source 1..9: note = Seed: VVVGAGDVG (KRAS G13D)
FVVTATDVT

SEQ ID NO: 86927 - protein, 9 aa, synthetic construct
  source 1..9: note = Seed: VVVGAGDVG (KRAS G13D)
FVVTATDVV

SEQ ID NO: 86928 - protein, 9 aa, synthetic construct
  source 1..9: note = Seed: VVVGAGDVG (KRAS G13D)
FVVTATDVW

SEQ ID NO: 86929 - protein, 9 aa, synthetic construct
  source 1..9: note = Seed: VVVGAGDVG (KRAS G13D)
FVVTATDVY

SEQ ID NO: 86930 - protein, 9 aa, synthetic construct
  source 1..9: note = Seed: VVVGAGDVG (KRAS G13D)
FVVTAVDVA

SEQ ID NO: 86931 - protein, 9 aa, synthetic construct
  source 1..9: note = Seed: VVVGAGDVG (KRAS G13D)
FVVTAVDVD

SEQ ID NO: 86932 - protein, 9 aa, synthetic construct
  source 1..9: note = Seed: VVVGAGDVG (KRAS G13D)
FVVTAVDVE

SEQ ID NO: 86933 - protein, 9 aa, synthetic construct
  source 1..9: note = Seed: VVVGAGDVG (KRAS G13D)
FVVTAVDVG

SEQ ID NO: 86934 - protein, 9 aa, synthetic construct
  source 1..9: note = Seed: VVVGAGDVG (KRAS G13D)
FVVTAVDVH

SEQ ID NO: 86935 - protein, 9 aa, synthetic construct
  source 1..9: note = Seed: VVVGAGDVG (KRAS G13D)
FVVTAVDVI

SEQ ID NO: 86936 - protein, 9 aa, synthetic construct
  source 1..9: note = Seed: VVVGAGDVG (KRAS G13D)
FVVTAVDVK

SEQ ID NO: 86937 - protein, 9 aa, synthetic construct
  source 1..9: note = Seed: VVVGAGDVG (KRAS G13D)
FVVTAVDVL

SEQ ID NO: 86938 - protein, 9 aa, synthetic construct
  source 1..9: note = Seed: VVVGAGDVG (KRAS G13D)
FVVTAVDVM

SEQ ID NO: 86939 - protein, 9 aa, synthetic construct
  source 1..9: note = Seed: VVVGAGDVG (KRAS G13D)
FVVTAVDVN

SEQ ID NO: 86940 - protein, 9 aa, synthetic construct
  source 1..9: note = Seed: VVVGAGDVG (KRAS G13D)
FVVTAVDVP

SEQ ID NO: 86941 - protein, 9 aa, synthetic construct
  source 1..9: note = Seed: VVVGAGDVG (KRAS G13D)
FVVTAVDVQ

SEQ ID NO: 86942 - protein, 9 aa, synthetic construct
  source 1..9: note = Seed: VVVGAGDVG (KRAS G13D)
FVVTAVDVR

SEQ ID NO: 86943 - protein, 9 aa, synthetic construct
  source 1..9: note = Seed: VVVGAGDVG (KRAS G13D)
FVVTAVDVS

SEQ ID NO: 86944 - protein, 9 aa, synthetic construct
  source 1..9: note = Seed: VVVGAGDVG (KRAS G13D)
FVVTAVDVT

SEQ ID NO: 86945 - protein, 9 aa, synthetic construct
  source 1..9: note = Seed: VVVGAGDVG (KRAS G13D)
FVVTAVDVV

SEQ ID NO: 86946 - protein, 9 aa, synthetic construct
  source 1..9: note = Seed: VVVGAGDVG (KRAS G13D)
FVVTAVDVY

SEQ ID NO: 86947 - protein, 9 aa, synthetic construct
  source 1..9: note = Seed: VVVGAGDVG (KRAS G13D)
FVVTAYDVA

SEQ ID NO: 86948 - protein, 9 aa, synthetic construct
  source 1..9: note = Seed: VVVGAGDVG (KRAS G13D)
FVVVAADVA

SEQ ID NO: 86949 - protein, 9 aa, synthetic construct
  source 1..9: note = Seed: VVVGAGDVG (KRAS G13D)
FVVVAADVC

SEQ ID NO: 86950 - protein, 9 aa, synthetic construct
  source 1..9: note = Seed: VVVGAGDVG (KRAS G13D)
FVVVAADVD

SEQ ID NO: 86951 - protein, 9 aa, synthetic construct
  source 1..9: note = Seed: VVVGAGDVG (KRAS G13D)
FVVVAADVE

SEQ ID NO: 86952 - protein, 9 aa, synthetic construct
  source 1..9: note = Seed: VVVGAGDVG (KRAS G13D)
FVVVAADVF

SEQ ID NO: 86953 - protein, 9 aa, synthetic construct
  source 1..9: note = Seed: VVVGAGDVG (KRAS G13D)
FVVVAADVG

SEQ ID NO: 86954 - protein, 9 aa, synthetic construct
  source 1..9: note = Seed: VVVGAGDVG (KRAS G13D)
FVVVAADVH

SEQ ID NO: 86955 - protein, 9 aa, synthetic construct
  source 1..9: note = Seed: VVVGAGDVG (KRAS G13D)
FVVVAADVI

SEQ ID NO: 86956 - protein, 9 aa, synthetic construct
  source 1..9: note = Seed: VVVGAGDVG (KRAS G13D)
FVVVAADVK

SEQ ID NO: 86957 - protein, 9 aa, synthetic construct
  source 1..9: note = Seed: VVVGAGDVG (KRAS G13D)
FVVVAADVL

SEQ ID NO: 86958 - protein, 9 aa, synthetic construct
  source 1..9: note = Seed: VVVGAGDVG (KRAS G13D)
FVVVAADVM

SEQ ID NO: 86959 - protein, 9 aa, synthetic construct
  source 1..9: note = Seed: VVVGAGDVG (KRAS G13D)
FVVVAADVN

SEQ ID NO: 86960 - protein, 9 aa, synthetic construct
  source 1..9: note = Seed: VVVGAGDVG (KRAS G13D)
FVVVAADVP

SEQ ID NO: 86961 - protein, 9 aa, synthetic construct
  source 1..9: note = Seed: VVVGAGDVG (KRAS G13D)
FVVVAADVQ

SEQ ID NO: 86962 - protein, 9 aa, synthetic construct
  source 1..9: note = Seed: VVVGAGDVG (KRAS G13D)
FVVVAADVR

SEQ ID NO: 86963 - protein, 9 aa, synthetic construct
  source 1..9: note = Seed: VVVGAGDVG (KRAS G13D)
FVVVAADVS

SEQ ID NO: 86964 - protein, 9 aa, synthetic construct
  source 1..9: note = Seed: VVVGAGDVG (KRAS G13D)
FVVVAADVT

SEQ ID NO: 86965 - protein, 9 aa, synthetic construct
  source 1..9: note = Seed: VVVGAGDVG (KRAS G13D)
FVVVAADVV

SEQ ID NO: 86966 - protein, 9 aa, synthetic construct
  source 1..9: note = Seed: VVVGAGDVG (KRAS G13D)
FVVVAADVY

SEQ ID NO: 86967 - protein, 9 aa, synthetic construct
  source 1..9: note = Seed: VVVGAGDVG (KRAS G13D)
FVVVADDVA

SEQ ID NO: 86968 - protein, 9 aa, synthetic construct
  source 1..9: note = Seed: VVVGAGDVG (KRAS G13D)
FVVVADDVG

SEQ ID NO: 86969 - protein, 9 aa, synthetic construct
  source 1..9: note = Seed: VVVGAGDVG (KRAS G13D)
FVVVADDVN

SEQ ID NO: 86970 - protein, 9 aa, synthetic construct
  source 1..9: note = Seed: VVVGAGDVG (KRAS G13D)
FVVVADDVS

SEQ ID NO: 86971 - protein, 9 aa, synthetic construct
  source 1..9: note = Seed: VVVGAGDVG (KRAS G13D)
FVVVAEDVA

SEQ ID NO: 86972 - protein, 9 aa, synthetic construct
  source 1..9: note = Seed: VVVGAGDVG (KRAS G13D)
FVVVAEDVH

SEQ ID NO: 86973 - protein, 9 aa, synthetic construct
  source 1..9: note = Seed: VVVGAGDVG (KRAS G13D)
FVVVAEDVL

SEQ ID NO: 86974 - protein, 9 aa, synthetic construct
  source 1..9: note = Seed: VVVGAGDVG (KRAS G13D)
FVVVAEDVM

SEQ ID NO: 86975 - protein, 9 aa, synthetic construct
  source 1..9: note = Seed: VVVGAGDVG (KRAS G13D)
FVVVAEDVN

SEQ ID NO: 86976 - protein, 9 aa, synthetic construct
  source 1..9: note = Seed: VVVGAGDVG (KRAS G13D)
FVVVAEDVS

SEQ ID NO: 86977 - protein, 9 aa, synthetic construct
  source 1..9: note = Seed: VVVGAGDVG (KRAS G13D)
FVVVAEDVT

SEQ ID NO: 86978 - protein, 9 aa, synthetic construct
  source 1..9: note = Seed: VVVGAGDVG (KRAS G13D)
FVVVAEDVV

SEQ ID NO: 86979 - protein, 9 aa, synthetic construct
  source 1..9: note = Seed: VVVGAGDVG (KRAS G13D)
FVVVAGDVA

SEQ ID NO: 86980 - protein, 9 aa, synthetic construct
  source 1..9: note = Seed: VVVGAGDVG (KRAS G13D)
FVVVAGDVD

SEQ ID NO: 86981 - protein, 9 aa, synthetic construct
  source 1..9: note = Seed: VVVGAGDVG (KRAS G13D)
FVVVAGDVE

SEQ ID NO: 86982 - protein, 9 aa, synthetic construct
  source 1..9: note = Seed: VVVGAGDVG (KRAS G13D)
FVVVAGDVG

SEQ ID NO: 86983 - protein, 9 aa, synthetic construct
  source 1..9: note = Seed: VVVGAGDVG (KRAS G13D)
FVVVAGDVH

SEQ ID NO: 86984 - protein, 9 aa, synthetic construct
  source 1..9: note = Seed: VVVGAGDVG (KRAS G13D)
FVVVAGDVI

SEQ ID NO: 86985 - protein, 9 aa, synthetic construct
  source 1..9: note = Seed: VVVGAGDVG (KRAS G13D)
FVVVAGDVK

SEQ ID NO: 86986 - protein, 9 aa, synthetic construct
  source 1..9: note = Seed: VVVGAGDVG (KRAS G13D)
FVVVAGDVL

SEQ ID NO: 86987 - protein, 9 aa, synthetic construct
  source 1..9: note = Seed: VVVGAGDVG (KRAS G13D)
FVVVAGDVM

SEQ ID NO: 86988 - protein, 9 aa, synthetic construct
  source 1..9: note = Seed: VVVGAGDVG (KRAS G13D)
FVVVAGDVN

SEQ ID NO: 86989 - protein, 9 aa, synthetic construct
  source 1..9: note = Seed: VVVGAGDVG (KRAS G13D)
FVVVAGDVP

SEQ ID NO: 86990 - protein, 9 aa, synthetic construct
  source 1..9: note = Seed: VVVGAGDVG (KRAS G13D)
FVVVAGDVQ

SEQ ID NO: 86991 - protein, 9 aa, synthetic construct
  source 1..9: note = Seed: VVVGAGDVG (KRAS G13D)
FVVVAGDVR

SEQ ID NO: 86992 - protein, 9 aa, synthetic construct
  source 1..9: note = Seed: VVVGAGDVG (KRAS G13D)
FVVVAGDVS

SEQ ID NO: 86993 - protein, 9 aa, synthetic construct
  source 1..9: note = Seed: VVVGAGDVG (KRAS G13D)
FVVVAGDVT

SEQ ID NO: 86994 - protein, 9 aa, synthetic construct
  source 1..9: note = Seed: VVVGAGDVG (KRAS G13D)
FVVVAGDVV

SEQ ID NO: 86995 - protein, 9 aa, synthetic construct
  source 1..9: note = Seed: VVVGAGDVG (KRAS G13D)
FVVVAGDVY

SEQ ID NO: 86996 - protein, 9 aa, synthetic construct
  source 1..9: note = Seed: VVVGAGDVG (KRAS G13D)
FVVVAHDVA

SEQ ID NO: 86997 - protein, 9 aa, synthetic construct
  source 1..9: note = Seed: VVVGAGDVG (KRAS G13D)
FVVVAHDVE

SEQ ID NO: 86998 - protein, 9 aa, synthetic construct
  source 1..9: note = Seed: VVVGAGDVG (KRAS G13D)
FVVVAHDVG

SEQ ID NO: 86999 - protein, 9 aa, synthetic construct
  source 1..9: note = Seed: VVVGAGDVG (KRAS G13D)
FVVVAHDVH

SEQ ID NO: 87000 - protein, 9 aa, synthetic construct
  source 1..9: note = Seed: VVVGAGDVG (KRAS G13D)
FVVVAHDVI

SEQ ID NO: 87001 - protein, 9 aa, synthetic construct
  source 1..9: note = Seed: VVVGAGDVG (KRAS G13D)
FVVVAHDVL

SEQ ID NO: 87002 - protein, 9 aa, synthetic construct
  source 1..9: note = Seed: VVVGAGDVG (KRAS G13D)
FVVVAHDVM

SEQ ID NO: 87003 - protein, 9 aa, synthetic construct
  source 1..9: note = Seed: VVVGAGDVG (KRAS G13D)
FVVVAHDVN

SEQ ID NO: 87004 - protein, 9 aa, synthetic construct
  source 1..9: note = Seed: VVVGAGDVG (KRAS G13D)
FVVVAHDVQ

SEQ ID NO: 87005 - protein, 9 aa, synthetic construct
  source 1..9: note = Seed: VVVGAGDVG (KRAS G13D)
FVVVAHDVS

SEQ ID NO: 87006 - protein, 9 aa, synthetic construct
  source 1..9: note = Seed: VVVGAGDVG (KRAS G13D)
FVVVAHDVT

SEQ ID NO: 87007 - protein, 9 aa, synthetic construct
  source 1..9: note = Seed: VVVGAGDVG (KRAS G13D)
FVVVAHDVV

SEQ ID NO: 87008 - protein, 9 aa, synthetic construct
  source 1..9: note = Seed: VVVGAGDVG (KRAS G13D)
FVVVAHDVY

SEQ ID NO: 87009 - protein, 9 aa, synthetic construct
  source 1..9: note = Seed: VVVGAGDVG (KRAS G13D)
FVVVAIDVA

SEQ ID NO: 87010 - protein, 9 aa, synthetic construct
  source 1..9: note = Seed: VVVGAGDVG (KRAS G13D)
FVVVAIDVD

SEQ ID NO: 87011 - protein, 9 aa, synthetic construct
  source 1..9: note = Seed: VVVGAGDVG (KRAS G13D)
FVVVAIDVG

SEQ ID NO: 87012 - protein, 9 aa, synthetic construct
  source 1..9: note = Seed: VVVGAGDVG (KRAS G13D)
FVVVAIDVH

SEQ ID NO: 87013 - protein, 9 aa, synthetic construct
  source 1..9: note = Seed: VVVGAGDVG (KRAS G13D)
FVVVAIDVM

SEQ ID NO: 87014 - protein, 9 aa, synthetic construct
  source 1..9: note = Seed: VVVGAGDVG (KRAS G13D)
FVVVAIDVN

SEQ ID NO: 87015 - protein, 9 aa, synthetic construct
  source 1..9: note = Seed: VVVGAGDVG (KRAS G13D)
FVVVAIDVQ

SEQ ID NO: 87016 - protein, 9 aa, synthetic construct
  source 1..9: note = Seed: VVVGAGDVG (KRAS G13D)
FVVVAIDVS

SEQ ID NO: 87017 - protein, 9 aa, synthetic construct
  source 1..9: note = Seed: VVVGAGDVG (KRAS G13D)
FVVVAIDVT

SEQ ID NO: 87018 - protein, 9 aa, synthetic construct
  source 1..9: note = Seed: VVVGAGDVG (KRAS G13D)
FVVVAKDVA

SEQ ID NO: 87019 - protein, 9 aa, synthetic construct
  source 1..9: note = Seed: VVVGAGDVG (KRAS G13D)
FVVVANDVA

SEQ ID NO: 87020 - protein, 9 aa, synthetic construct
  source 1..9: note = Seed: VVVGAGDVG (KRAS G13D)
FVVVANDVC

SEQ ID NO: 87021 - protein, 9 aa, synthetic construct
  source 1..9: note = Seed: VVVGAGDVG (KRAS G13D)
FVVVANDVD

SEQ ID NO: 87022 - protein, 9 aa, synthetic construct
  source 1..9: note = Seed: VVVGAGDVG (KRAS G13D)
FVVVANDVE

SEQ ID NO: 87023 - protein, 9 aa, synthetic construct
  source 1..9: note = Seed: VVVGAGDVG (KRAS G13D)
FVVVANDVF

SEQ ID NO: 87024 - protein, 9 aa, synthetic construct
  source 1..9: note = Seed: VVVGAGDVG (KRAS G13D)
FVVVANDVG

SEQ ID NO: 87025 - protein, 9 aa, synthetic construct
  source 1..9: note = Seed: VVVGAGDVG (KRAS G13D)
FVVVANDVH

SEQ ID NO: 87026 - protein, 9 aa, synthetic construct
  source 1..9: note = Seed: VVVGAGDVG (KRAS G13D)
FVVVANDVI

SEQ ID NO: 87027 - protein, 9 aa, synthetic construct
  source 1..9: note = Seed: VVVGAGDVG (KRAS G13D)
FVVVANDVK

SEQ ID NO: 87028 - protein, 9 aa, synthetic construct
  source 1..9: note = Seed: VVVGAGDVG (KRAS G13D)
FVVVANDVL

SEQ ID NO: 87029 - protein, 9 aa, synthetic construct
  source 1..9: note = Seed: VVVGAGDVG (KRAS G13D)
FVVVANDVM

SEQ ID NO: 87030 - protein, 9 aa, synthetic construct
  source 1..9: note = Seed: VVVGAGDVG (KRAS G13D)
FVVVANDVN

SEQ ID NO: 87031 - protein, 9 aa, synthetic construct
  source 1..9: note = Seed: VVVGAGDVG (KRAS G13D)
FVVVANDVP

SEQ ID NO: 87032 - protein, 9 aa, synthetic construct
  source 1..9: note = Seed: VVVGAGDVG (KRAS G13D)
FVVVANDVQ

SEQ ID NO: 87033 - protein, 9 aa, synthetic construct
  source 1..9: note = Seed: VVVGAGDVG (KRAS G13D)
FVVVANDVR

SEQ ID NO: 87034 - protein, 9 aa, synthetic construct
  source 1..9: note = Seed: VVVGAGDVG (KRAS G13D)
FVVVANDVS

SEQ ID NO: 87035 - protein, 9 aa, synthetic construct
  source 1..9: note = Seed: VVVGAGDVG (KRAS G13D)
FVVVANDVT

SEQ ID NO: 87036 - protein, 9 aa, synthetic construct
  source 1..9: note = Seed: VVVGAGDVG (KRAS G13D)
FVVVANDVV

SEQ ID NO: 87037 - protein, 9 aa, synthetic construct
  source 1..9: note = Seed: VVVGAGDVG (KRAS G13D)
FVVVANDVW

SEQ ID NO: 87038 - protein, 9 aa, synthetic construct
  source 1..9: note = Seed: VVVGAGDVG (KRAS G13D)
FVVVANDVY

SEQ ID NO: 87039 - protein, 9 aa, synthetic construct
  source 1..9: note = Seed: VVVGAGDVG (KRAS G13D)
FVVVAPDVA

SEQ ID NO: 87040 - protein, 9 aa, synthetic construct
  source 1..9: note = Seed: VVVGAGDVG (KRAS G13D)
FVVVAPDVC

SEQ ID NO: 87041 - protein, 9 aa, synthetic construct
  source 1..9: note = Seed: VVVGAGDVG (KRAS G13D)
FVVVAPDVD

SEQ ID NO: 87042 - protein, 9 aa, synthetic construct
  source 1..9: note = Seed: VVVGAGDVG (KRAS G13D)
FVVVAPDVE

SEQ ID NO: 87043 - protein, 9 aa, synthetic construct
  source 1..9: note = Seed: VVVGAGDVG (KRAS G13D)
FVVVAPDVF

SEQ ID NO: 87044 - protein, 9 aa, synthetic construct
  source 1..9: note = Seed: VVVGAGDVG (KRAS G13D)
FVVVAPDVG

SEQ ID NO: 87045 - protein, 9 aa, synthetic construct
  source 1..9: note = Seed: VVVGAGDVG (KRAS G13D)
FVVVAPDVH

SEQ ID NO: 87046 - protein, 9 aa, synthetic construct
  source 1..9: note = Seed: VVVGAGDVG (KRAS G13D)
FVVVAPDVI

SEQ ID NO: 87047 - protein, 9 aa, synthetic construct
  source 1..9: note = Seed: VVVGAGDVG (KRAS G13D)
FVVVAPDVK

SEQ ID NO: 87048 - protein, 9 aa, synthetic construct
  source 1..9: note = Seed: VVVGAGDVG (KRAS G13D)
FVVVAPDVL

SEQ ID NO: 87049 - protein, 9 aa, synthetic construct
  source 1..9: note = Seed: VVVGAGDVG (KRAS G13D)
FVVVAPDVM

SEQ ID NO: 87050 - protein, 9 aa, synthetic construct
  source 1..9: note = Seed: VVVGAGDVG (KRAS G13D)
FVVVAPDVN

SEQ ID NO: 87051 - protein, 9 aa, synthetic construct
  source 1..9: note = Seed: VVVGAGDVG (KRAS G13D)
FVVVAPDVP

SEQ ID NO: 87052 - protein, 9 aa, synthetic construct
  source 1..9: note = Seed: VVVGAGDVG (KRAS G13D)
FVVVAPDVQ

SEQ ID NO: 87053 - protein, 9 aa, synthetic construct
  source 1..9: note = Seed: VVVGAGDVG (KRAS G13D)
FVVVAPDVR

SEQ ID NO: 87054 - protein, 9 aa, synthetic construct
  source 1..9: note = Seed: VVVGAGDVG (KRAS G13D)
FVVVAPDVS

SEQ ID NO: 87055 - protein, 9 aa, synthetic construct
  source 1..9: note = Seed: VVVGAGDVG (KRAS G13D)
FVVVAPDVT

SEQ ID NO: 87056 - protein, 9 aa, synthetic construct
  source 1..9: note = Seed: VVVGAGDVG (KRAS G13D)
FVVVAPDVV

SEQ ID NO: 87057 - protein, 9 aa, synthetic construct
  source 1..9: note = Seed: VVVGAGDVG (KRAS G13D)
FVVVAPDVW

SEQ ID NO: 87058 - protein, 9 aa, synthetic construct
  source 1..9: note = Seed: VVVGAGDVG (KRAS G13D)
FVVVAPDVY

SEQ ID NO: 87059 - protein, 9 aa, synthetic construct
  source 1..9: note = Seed: VVVGAGDVG (KRAS G13D)
FVVVAQDVA

SEQ ID NO: 87060 - protein, 9 aa, synthetic construct
  source 1..9: note = Seed: VVVGAGDVG (KRAS G13D)
FVVVAQDVG

SEQ ID NO: 87061 - protein, 9 aa, synthetic construct
  source 1..9: note = Seed: VVVGAGDVG (KRAS G13D)
FVVVAQDVM

SEQ ID NO: 87062 - protein, 9 aa, synthetic construct
  source 1..9: note = Seed: VVVGAGDVG (KRAS G13D)
FVVVAQDVN

SEQ ID NO: 87063 - protein, 9 aa, synthetic construct
  source 1..9: note = Seed: VVVGAGDVG (KRAS G13D)
FVVVAQDVS

SEQ ID NO: 87064 - protein, 9 aa, synthetic construct
  source 1..9: note = Seed: VVVGAGDVG (KRAS G13D)
FVVVAQDVT

SEQ ID NO: 87065 - protein, 9 aa, synthetic construct
  source 1..9: note = Seed: VVVGAGDVG (KRAS G13D)
FVVVARDVA

SEQ ID NO: 87066 - protein, 9 aa, synthetic construct
  source 1..9: note = Seed: VVVGAGDVG (KRAS G13D)
FVVVASDVA

SEQ ID NO: 87067 - protein, 9 aa, synthetic construct
  source 1..9: note = Seed: VVVGAGDVG (KRAS G13D)
FVVVASDVC

SEQ ID NO: 87068 - protein, 9 aa, synthetic construct
  source 1..9: note = Seed: VVVGAGDVG (KRAS G13D)
FVVVASDVD

SEQ ID NO: 87069 - protein, 9 aa, synthetic construct
  source 1..9: note = Seed: VVVGAGDVG (KRAS G13D)
FVVVASDVE

SEQ ID NO: 87070 - protein, 9 aa, synthetic construct
  source 1..9: note = Seed: VVVGAGDVG (KRAS G13D)
FVVVASDVF

SEQ ID NO: 87071 - protein, 9 aa, synthetic construct
  source 1..9: note = Seed: VVVGAGDVG (KRAS G13D)
FVVVASDVG

SEQ ID NO: 87072 - protein, 9 aa, synthetic construct
  source 1..9: note = Seed: VVVGAGDVG (KRAS G13D)
FVVVASDVH

SEQ ID NO: 87073 - protein, 9 aa, synthetic construct
  source 1..9: note = Seed: VVVGAGDVG (KRAS G13D)
FVVVASDVI

SEQ ID NO: 87074 - protein, 9 aa, synthetic construct
  source 1..9: note = Seed: VVVGAGDVG (KRAS G13D)
FVVVASDVK

SEQ ID NO: 87075 - protein, 9 aa, synthetic construct
  source 1..9: note = Seed: VVVGAGDVG (KRAS G13D)
FVVVASDVL

SEQ ID NO: 87076 - protein, 9 aa, synthetic construct
  source 1..9: note = Seed: VVVGAGDVG (KRAS G13D)
FVVVASDVM

SEQ ID NO: 87077 - protein, 9 aa, synthetic construct
  source 1..9: note = Seed: VVVGAGDVG (KRAS G13D)
FVVVASDVN

SEQ ID NO: 87078 - protein, 9 aa, synthetic construct
  source 1..9: note = Seed: VVVGAGDVG (KRAS G13D)
FVVVASDVP

SEQ ID NO: 87079 - protein, 9 aa, synthetic construct
  source 1..9: note = Seed: VVVGAGDVG (KRAS G13D)
FVVVASDVQ

SEQ ID NO: 87080 - protein, 9 aa, synthetic construct
  source 1..9: note = Seed: VVVGAGDVG (KRAS G13D)
FVVVASDVR

SEQ ID NO: 87081 - protein, 9 aa, synthetic construct
  source 1..9: note = Seed: VVVGAGDVG (KRAS G13D)
FVVVASDVS

SEQ ID NO: 87082 - protein, 9 aa, synthetic construct
  source 1..9: note = Seed: VVVGAGDVG (KRAS G13D)
FVVVASDVT

SEQ ID NO: 87083 - protein, 9 aa, synthetic construct
  source 1..9: note = Seed: VVVGAGDVG (KRAS G13D)
FVVVASDVV

SEQ ID NO: 87084 - protein, 9 aa, synthetic construct
  source 1..9: note = Seed: VVVGAGDVG (KRAS G13D)
FVVVASDVY

SEQ ID NO: 87085 - protein, 9 aa, synthetic construct
  source 1..9: note = Seed: VVVGAGDVG (KRAS G13D)
FVVVATDVA

SEQ ID NO: 87086 - protein, 9 aa, synthetic construct
  source 1..9: note = Seed: VVVGAGDVG (KRAS G13D)
FVVVATDVD

SEQ ID NO: 87087 - protein, 9 aa, synthetic construct
  source 1..9: note = Seed: VVVGAGDVG (KRAS G13D)
FVVVATDVE

SEQ ID NO: 87088 - protein, 9 aa, synthetic construct
  source 1..9: note = Seed: VVVGAGDVG (KRAS G13D)
FVVVATDVF

SEQ ID NO: 87089 - protein, 9 aa, synthetic construct
  source 1..9: note = Seed: VVVGAGDVG (KRAS G13D)
FVVVATDVG

SEQ ID NO: 87090 - protein, 9 aa, synthetic construct
  source 1..9: note = Seed: VVVGAGDVG (KRAS G13D)
FVVVATDVH

SEQ ID NO: 87091 - protein, 9 aa, synthetic construct
  source 1..9: note = Seed: VVVGAGDVG (KRAS G13D)
FVVVATDVI

SEQ ID NO: 87092 - protein, 9 aa, synthetic construct
  source 1..9: note = Seed: VVVGAGDVG (KRAS G13D)
FVVVATDVK

SEQ ID NO: 87093 - protein, 9 aa, synthetic construct
  source 1..9: note = Seed: VVVGAGDVG (KRAS G13D)
FVVVATDVL

SEQ ID NO: 87094 - protein, 9 aa, synthetic construct
  source 1..9: note = Seed: VVVGAGDVG (KRAS G13D)
FVVVATDVM

SEQ ID NO: 87095 - protein, 9 aa, synthetic construct
  source 1..9: note = Seed: VVVGAGDVG (KRAS G13D)
FVVVATDVN

SEQ ID NO: 87096 - protein, 9 aa, synthetic construct
  source 1..9: note = Seed: VVVGAGDVG (KRAS G13D)
FVVVATDVP

SEQ ID NO: 87097 - protein, 9 aa, synthetic construct
  source 1..9: note = Seed: VVVGAGDVG (KRAS G13D)
FVVVATDVQ

SEQ ID NO: 87098 - protein, 9 aa, synthetic construct
  source 1..9: note = Seed: VVVGAGDVG (KRAS G13D)
FVVVATDVR

SEQ ID NO: 87099 - protein, 9 aa, synthetic construct
  source 1..9: note = Seed: VVVGAGDVG (KRAS G13D)
FVVVATDVS

SEQ ID NO: 87100 - protein, 9 aa, synthetic construct
  source 1..9: note = Seed: VVVGAGDVG (KRAS G13D)
FVVVATDVT

SEQ ID NO: 87101 - protein, 9 aa, synthetic construct
  source 1..9: note = Seed: VVVGAGDVG (KRAS G13D)
FVVVATDVV

SEQ ID NO: 87102 - protein, 9 aa, synthetic construct
  source 1..9: note = Seed: VVVGAGDVG (KRAS G13D)
FVVVATDVY

SEQ ID NO: 87103 - protein, 9 aa, synthetic construct
  source 1..9: note = Seed: VVVGAGDVG (KRAS G13D)
FVVVAVDVA

SEQ ID NO: 87104 - protein, 9 aa, synthetic construct
  source 1..9: note = Seed: VVVGAGDVG (KRAS G13D)
FVVVAVDVD

SEQ ID NO: 87105 - protein, 9 aa, synthetic construct
  source 1..9: note = Seed: VVVGAGDVG (KRAS G13D)
FVVVAVDVE

SEQ ID NO: 87106 - protein, 9 aa, synthetic construct
  source 1..9: note = Seed: VVVGAGDVG (KRAS G13D)
FVVVAVDVG

SEQ ID NO: 87107 - protein, 9 aa, synthetic construct
  source 1..9: note = Seed: VVVGAGDVG (KRAS G13D)
FVVVAVDVH

SEQ ID NO: 87108 - protein, 9 aa, synthetic construct
  source 1..9: note = Seed: VVVGAGDVG (KRAS G13D)
FVVVAVDVK

SEQ ID NO: 87109 - protein, 9 aa, synthetic construct
  source 1..9: note = Seed: VVVGAGDVG (KRAS G13D)
FVVVAVDVL

SEQ ID NO: 87110 - protein, 9 aa, synthetic construct
  source 1..9: note = Seed: VVVGAGDVG (KRAS G13D)
FVVVAVDVM

SEQ ID NO: 87111 - protein, 9 aa, synthetic construct
  source 1..9: note = Seed: VVVGAGDVG (KRAS G13D)
FVVVAVDVN

SEQ ID NO: 87112 - protein, 9 aa, synthetic construct
  source 1..9: note = Seed: VVVGAGDVG (KRAS G13D)
FVVVAVDVP

SEQ ID NO: 87113 - protein, 9 aa, synthetic construct
  source 1..9: note = Seed: VVVGAGDVG (KRAS G13D)
FVVVAVDVQ

SEQ ID NO: 87114 - protein, 9 aa, synthetic construct
  source 1..9: note = Seed: VVVGAGDVG (KRAS G13D)
FVVVAVDVR

SEQ ID NO: 87115 - protein, 9 aa, synthetic construct
  source 1..9: note = Seed: VVVGAGDVG (KRAS G13D)
FVVVAVDVS

SEQ ID NO: 87116 - protein, 9 aa, synthetic construct
  source 1..9: note = Seed: VVVGAGDVG (KRAS G13D)
FVVVAVDVT

SEQ ID NO: 87117 - protein, 9 aa, synthetic construct
  source 1..9: note = Seed: VVVGAGDVG (KRAS G13D)
FVVVAVDVV

SEQ ID NO: 87118 - protein, 9 aa, synthetic construct
  source 1..9: note = Seed: VVVGAGDVG (KRAS G13D)
FVVVAVDVY

SEQ ID NO: 87119 - protein, 9 aa, synthetic construct
  source 1..9: note = Seed: VVVGAGDVG (KRAS G13D)
FVVWAADVA

SEQ ID NO: 87120 - protein, 9 aa, synthetic construct
  source 1..9: note = Seed: VVVGAGDVG (KRAS G13D)
FVVWAADVD

SEQ ID NO: 87121 - protein, 9 aa, synthetic construct
  source 1..9: note = Seed: VVVGAGDVG (KRAS G13D)
FVVWAADVE

SEQ ID NO: 87122 - protein, 9 aa, synthetic construct
  source 1..9: note = Seed: VVVGAGDVG (KRAS G13D)
FVVWAADVF

SEQ ID NO: 87123 - protein, 9 aa, synthetic construct
  source 1..9: note = Seed: VVVGAGDVG (KRAS G13D)
FVVWAADVG

SEQ ID NO: 87124 - protein, 9 aa, synthetic construct
  source 1..9: note = Seed: VVVGAGDVG (KRAS G13D)
FVVWAADVH

SEQ ID NO: 87125 - protein, 9 aa, synthetic construct
  source 1..9: note = Seed: VVVGAGDVG (KRAS G13D)
FVVWAADVI

SEQ ID NO: 87126 - protein, 9 aa, synthetic construct
  source 1..9: note = Seed: VVVGAGDVG (KRAS G13D)
FVVWAADVK

SEQ ID NO: 87127 - protein, 9 aa, synthetic construct
  source 1..9: note = Seed: VVVGAGDVG (KRAS G13D)
FVVWAADVL

SEQ ID NO: 87128 - protein, 9 aa, synthetic construct
  source 1..9: note = Seed: VVVGAGDVG (KRAS G13D)
FVVWAADVM

SEQ ID NO: 87129 - protein, 9 aa, synthetic construct
  source 1..9: note = Seed: VVVGAGDVG (KRAS G13D)
FVVWAADVN

SEQ ID NO: 87130 - protein, 9 aa, synthetic construct
  source 1..9: note = Seed: VVVGAGDVG (KRAS G13D)
FVVWAADVP

SEQ ID NO: 87131 - protein, 9 aa, synthetic construct
  source 1..9: note = Seed: VVVGAGDVG (KRAS G13D)
FVVWAADVQ

SEQ ID NO: 87132 - protein, 9 aa, synthetic construct
  source 1..9: note = Seed: VVVGAGDVG (KRAS G13D)
FVVWAADVR

SEQ ID NO: 87133 - protein, 9 aa, synthetic construct
  source 1..9: note = Seed: VVVGAGDVG (KRAS G13D)
FVVWAADVS

SEQ ID NO: 87134 - protein, 9 aa, synthetic construct
  source 1..9: note = Seed: VVVGAGDVG (KRAS G13D)
FVVWAADVT

SEQ ID NO: 87135 - protein, 9 aa, synthetic construct
  source 1..9: note = Seed: VVVGAGDVG (KRAS G13D)
FVVWAADVV

SEQ ID NO: 87136 - protein, 9 aa, synthetic construct
  source 1..9: note = Seed: VVVGAGDVG (KRAS G13D)
FVVWAADVY

SEQ ID NO: 87137 - protein, 9 aa, synthetic construct
  source 1..9: note = Seed: VVVGAGDVG (KRAS G13D)
FVVWADDVA

SEQ ID NO: 87138 - protein, 9 aa, synthetic construct
  source 1..9: note = Seed: VVVGAGDVG (KRAS G13D)
FVVWADDVC

SEQ ID NO: 87139 - protein, 9 aa, synthetic construct
  source 1..9: note = Seed: VVVGAGDVG (KRAS G13D)
FVVWADDVD

SEQ ID NO: 87140 - protein, 9 aa, synthetic construct
  source 1..9: note = Seed: VVVGAGDVG (KRAS G13D)
FVVWADDVE

SEQ ID NO: 87141 - protein, 9 aa, synthetic construct
  source 1..9: note = Seed: VVVGAGDVG (KRAS G13D)
FVVWADDVF

SEQ ID NO: 87142 - protein, 9 aa, synthetic construct
  source 1..9: note = Seed: VVVGAGDVG (KRAS G13D)
FVVWADDVG

SEQ ID NO: 87143 - protein, 9 aa, synthetic construct
  source 1..9: note = Seed: VVVGAGDVG (KRAS G13D)
FVVWADDVI

SEQ ID NO: 87144 - protein, 9 aa, synthetic construct
  source 1..9: note = Seed: VVVGAGDVG (KRAS G13D)
FVVWADDVL

SEQ ID NO: 87145 - protein, 9 aa, synthetic construct
  source 1..9: note = Seed: VVVGAGDVG (KRAS G13D)
FVVWADDVM

SEQ ID NO: 87146 - protein, 9 aa, synthetic construct
  source 1..9: note = Seed: VVVGAGDVG (KRAS G13D)
FVVWADDVN

SEQ ID NO: 87147 - protein, 9 aa, synthetic construct
  source 1..9: note = Seed: VVVGAGDVG (KRAS G13D)
FVVWADDVP

SEQ ID NO: 87148 - protein, 9 aa, synthetic construct
  source 1..9: note = Seed: VVVGAGDVG (KRAS G13D)
FVVWADDVQ

SEQ ID NO: 87149 - protein, 9 aa, synthetic construct
  source 1..9: note = Seed: VVVGAGDVG (KRAS G13D)
FVVWADDVS

SEQ ID NO: 87150 - protein, 9 aa, synthetic construct
  source 1..9: note = Seed: VVVGAGDVG (KRAS G13D)
FVVWADDVT

SEQ ID NO: 87151 - protein, 9 aa, synthetic construct
  source 1..9: note = Seed: VVVGAGDVG (KRAS G13D)
FVVWADDVV

SEQ ID NO: 87152 - protein, 9 aa, synthetic construct
  source 1..9: note = Seed: VVVGAGDVG (KRAS G13D)
FVVWADDVW

SEQ ID NO: 87153 - protein, 9 aa, synthetic construct
  source 1..9: note = Seed: VVVGAGDVG (KRAS G13D)
FVVWADDVY

SEQ ID NO: 87154 - protein, 9 aa, synthetic construct
  source 1..9: note = Seed: VVVGAGDVG (KRAS G13D)
FVVWAEDVA

SEQ ID NO: 87155 - protein, 9 aa, synthetic construct
  source 1..9: note = Seed: VVVGAGDVG (KRAS G13D)
FVVWAEDVI

SEQ ID NO: 87156 - protein, 9 aa, synthetic construct
  source 1..9: note = Seed: VVVGAGDVG (KRAS G13D)
FVVWAEDVL

SEQ ID NO: 87157 - protein, 9 aa, synthetic construct
  source 1..9: note = Seed: VVVGAGDVG (KRAS G13D)
FVVWAEDVM

SEQ ID NO: 87158 - protein, 9 aa, synthetic construct
  source 1..9: note = Seed: VVVGAGDVG (KRAS G13D)
FVVWAEDVV

SEQ ID NO: 87159 - protein, 9 aa, synthetic construct
  source 1..9: note = Seed: VVVGAGDVG (KRAS G13D)
FVVWAGDVA

SEQ ID NO: 87160 - protein, 9 aa, synthetic construct
  source 1..9: note = Seed: VVVGAGDVG (KRAS G13D)
FVVWAGDVI

SEQ ID NO: 87161 - protein, 9 aa, synthetic construct
  source 1..9: note = Seed: VVVGAGDVG (KRAS G13D)
FVVWAGDVL

SEQ ID NO: 87162 - protein, 9 aa, synthetic construct
  source 1..9: note = Seed: VVVGAGDVG (KRAS G13D)
FVVWAGDVM

SEQ ID NO: 87163 - protein, 9 aa, synthetic construct
  source 1..9: note = Seed: VVVGAGDVG (KRAS G13D)
FVVWAGDVN

SEQ ID NO: 87164 - protein, 9 aa, synthetic construct
  source 1..9: note = Seed: VVVGAGDVG (KRAS G13D)
FVVWAGDVS

SEQ ID NO: 87165 - protein, 9 aa, synthetic construct
  source 1..9: note = Seed: VVVGAGDVG (KRAS G13D)
FVVWAGDVV

SEQ ID NO: 87166 - protein, 9 aa, synthetic construct
  source 1..9: note = Seed: VVVGAGDVG (KRAS G13D)
FVVWAHDVA

SEQ ID NO: 87167 - protein, 9 aa, synthetic construct
  source 1..9: note = Seed: VVVGAGDVG (KRAS G13D)
FVVWAHDVF

SEQ ID NO: 87168 - protein, 9 aa, synthetic construct
  source 1..9: note = Seed: VVVGAGDVG (KRAS G13D)
FVVWAHDVI

SEQ ID NO: 87169 - protein, 9 aa, synthetic construct
  source 1..9: note = Seed: VVVGAGDVG (KRAS G13D)
FVVWAHDVL

SEQ ID NO: 87170 - protein, 9 aa, synthetic construct
  source 1..9: note = Seed: VVVGAGDVG (KRAS G13D)
FVVWAHDVM

SEQ ID NO: 87171 - protein, 9 aa, synthetic construct
  source 1..9: note = Seed: VVVGAGDVG (KRAS G13D)
FVVWAHDVN

SEQ ID NO: 87172 - protein, 9 aa, synthetic construct
  source 1..9: note = Seed: VVVGAGDVG (KRAS G13D)
FVVWAHDVQ

SEQ ID NO: 87173 - protein, 9 aa, synthetic construct
  source 1..9: note = Seed: VVVGAGDVG (KRAS G13D)
FVVWAHDVS

SEQ ID NO: 87174 - protein, 9 aa, synthetic construct
  source 1..9: note = Seed: VVVGAGDVG (KRAS G13D)
FVVWAHDVV

SEQ ID NO: 87175 - protein, 9 aa, synthetic construct
  source 1..9: note = Seed: VVVGAGDVG (KRAS G13D)
FVVWAHDVY

SEQ ID NO: 87176 - protein, 9 aa, synthetic construct
  source 1..9: note = Seed: VVVGAGDVG (KRAS G13D)
FVVWAIDVA

SEQ ID NO: 87177 - protein, 9 aa, synthetic construct
  source 1..9: note = Seed: VVVGAGDVG (KRAS G13D)
FVVWAIDVD

SEQ ID NO: 87178 - protein, 9 aa, synthetic construct
  source 1..9: note = Seed: VVVGAGDVG (KRAS G13D)
FVVWAIDVE

SEQ ID NO: 87179 - protein, 9 aa, synthetic construct
  source 1..9: note = Seed: VVVGAGDVG (KRAS G13D)
FVVWAIDVF

SEQ ID NO: 87180 - protein, 9 aa, synthetic construct
  source 1..9: note = Seed: VVVGAGDVG (KRAS G13D)
FVVWAIDVG

SEQ ID NO: 87181 - protein, 9 aa, synthetic construct
  source 1..9: note = Seed: VVVGAGDVG (KRAS G13D)
FVVWAIDVH

SEQ ID NO: 87182 - protein, 9 aa, synthetic construct
  source 1..9: note = Seed: VVVGAGDVG (KRAS G13D)
FVVWAIDVI

SEQ ID NO: 87183 - protein, 9 aa, synthetic construct
  source 1..9: note = Seed: VVVGAGDVG (KRAS G13D)
FVVWAIDVL

SEQ ID NO: 87184 - protein, 9 aa, synthetic construct
  source 1..9: note = Seed: VVVGAGDVG (KRAS G13D)
FVVWAIDVM

SEQ ID NO: 87185 - protein, 9 aa, synthetic construct
  source 1..9: note = Seed: VVVGAGDVG (KRAS G13D)
FVVWAIDVN

SEQ ID NO: 87186 - protein, 9 aa, synthetic construct
  source 1..9: note = Seed: VVVGAGDVG (KRAS G13D)
FVVWAIDVQ

SEQ ID NO: 87187 - protein, 9 aa, synthetic construct
  source 1..9: note = Seed: VVVGAGDVG (KRAS G13D)
FVVWAIDVR

SEQ ID NO: 87188 - protein, 9 aa, synthetic construct
  source 1..9: note = Seed: VVVGAGDVG (KRAS G13D)
FVVWAIDVS

SEQ ID NO: 87189 - protein, 9 aa, synthetic construct
  source 1..9: note = Seed: VVVGAGDVG (KRAS G13D)
FVVWAIDVT

SEQ ID NO: 87190 - protein, 9 aa, synthetic construct
  source 1..9: note = Seed: VVVGAGDVG (KRAS G13D)
FVVWAIDVV

SEQ ID NO: 87191 - protein, 9 aa, synthetic construct
  source 1..9: note = Seed: VVVGAGDVG (KRAS G13D)
FVVWAIDVY

SEQ ID NO: 87192 - protein, 9 aa, synthetic construct
  source 1..9: note = Seed: VVVGAGDVG (KRAS G13D)
FVVWALDVA

SEQ ID NO: 87193 - protein, 9 aa, synthetic construct
  source 1..9: note = Seed: VVVGAGDVG (KRAS G13D)
FVVWALDVF

SEQ ID NO: 87194 - protein, 9 aa, synthetic construct
  source 1..9: note = Seed: VVVGAGDVG (KRAS G13D)
FVVWALDVI

SEQ ID NO: 87195 - protein, 9 aa, synthetic construct
  source 1..9: note = Seed: VVVGAGDVG (KRAS G13D)
FVVWALDVL

SEQ ID NO: 87196 - protein, 9 aa, synthetic construct
  source 1..9: note = Seed: VVVGAGDVG (KRAS G13D)
FVVWALDVM

SEQ ID NO: 87197 - protein, 9 aa, synthetic construct
  source 1..9: note = Seed: VVVGAGDVG (KRAS G13D)
FVVWALDVN

SEQ ID NO: 87198 - protein, 9 aa, synthetic construct
  source 1..9: note = Seed: VVVGAGDVG (KRAS G13D)
FVVWALDVQ

SEQ ID NO: 87199 - protein, 9 aa, synthetic construct
  source 1..9: note = Seed: VVVGAGDVG (KRAS G13D)
FVVWALDVS

SEQ ID NO: 87200 - protein, 9 aa, synthetic construct
  source 1..9: note = Seed: VVVGAGDVG (KRAS G13D)
FVVWALDVV

SEQ ID NO: 87201 - protein, 9 aa, synthetic construct
  source 1..9: note = Seed: VVVGAGDVG (KRAS G13D)
FVVWALDVY

SEQ ID NO: 87202 - protein, 9 aa, synthetic construct
  source 1..9: note = Seed: VVVGAGDVG (KRAS G13D)
FVVWAMDVA

SEQ ID NO: 87203 - protein, 9 aa, synthetic construct
  source 1..9: note = Seed: VVVGAGDVG (KRAS G13D)
FVVWAMDVE

SEQ ID NO: 87204 - protein, 9 aa, synthetic construct
  source 1..9: note = Seed: VVVGAGDVG (KRAS G13D)
FVVWAMDVF

SEQ ID NO: 87205 - protein, 9 aa, synthetic construct
  source 1..9: note = Seed: VVVGAGDVG (KRAS G13D)
FVVWAMDVI

SEQ ID NO: 87206 - protein, 9 aa, synthetic construct
  source 1..9: note = Seed: VVVGAGDVG (KRAS G13D)
FVVWAMDVL

SEQ ID NO: 87207 - protein, 9 aa, synthetic construct
  source 1..9: note = Seed: VVVGAGDVG (KRAS G13D)
FVVWAMDVM

SEQ ID NO: 87208 - protein, 9 aa, synthetic construct
  source 1..9: note = Seed: VVVGAGDVG (KRAS G13D)
FVVWAMDVQ

SEQ ID NO: 87209 - protein, 9 aa, synthetic construct
  source 1..9: note = Seed: VVVGAGDVG (KRAS G13D)
FVVWAMDVR

SEQ ID NO: 87210 - protein, 9 aa, synthetic construct
  source 1..9: note = Seed: VVVGAGDVG (KRAS G13D)
FVVWAMDVS

SEQ ID NO: 87211 - protein, 9 aa, synthetic construct
  source 1..9: note = Seed: VVVGAGDVG (KRAS G13D)
FVVWAMDVT

SEQ ID NO: 87212 - protein, 9 aa, synthetic construct
  source 1..9: note = Seed: VVVGAGDVG (KRAS G13D)
FVVWAMDVV

SEQ ID NO: 87213 - protein, 9 aa, synthetic construct
  source 1..9: note = Seed: VVVGAGDVG (KRAS G13D)
FVVWAMDVY

SEQ ID NO: 87214 - protein, 9 aa, synthetic construct
  source 1..9: note = Seed: VVVGAGDVG (KRAS G13D)
FVVWANDVA

SEQ ID NO: 87215 - protein, 9 aa, synthetic construct
  source 1..9: note = Seed: VVVGAGDVG (KRAS G13D)
FVVWANDVC

SEQ ID NO: 87216 - protein, 9 aa, synthetic construct
  source 1..9: note = Seed: VVVGAGDVG (KRAS G13D)
FVVWANDVD

SEQ ID NO: 87217 - protein, 9 aa, synthetic construct
  source 1..9: note = Seed: VVVGAGDVG (KRAS G13D)
FVVWANDVE

SEQ ID NO: 87218 - protein, 9 aa, synthetic construct
  source 1..9: note = Seed: VVVGAGDVG (KRAS G13D)
FVVWANDVF

SEQ ID NO: 87219 - protein, 9 aa, synthetic construct
  source 1..9: note = Seed: VVVGAGDVG (KRAS G13D)
FVVWANDVG

SEQ ID NO: 87220 - protein, 9 aa, synthetic construct
  source 1..9: note = Seed: VVVGAGDVG (KRAS G13D)
FVVWANDVH

SEQ ID NO: 87221 - protein, 9 aa, synthetic construct
  source 1..9: note = Seed: VVVGAGDVG (KRAS G13D)
FVVWANDVI

SEQ ID NO: 87222 - protein, 9 aa, synthetic construct
  source 1..9: note = Seed: VVVGAGDVG (KRAS G13D)
FVVWANDVK

SEQ ID NO: 87223 - protein, 9 aa, synthetic construct
  source 1..9: note = Seed: VVVGAGDVG (KRAS G13D)
FVVWANDVL

SEQ ID NO: 87224 - protein, 9 aa, synthetic construct
  source 1..9: note = Seed: VVVGAGDVG (KRAS G13D)
FVVWANDVM

SEQ ID NO: 87225 - protein, 9 aa, synthetic construct
  source 1..9: note = Seed: VVVGAGDVG (KRAS G13D)
FVVWANDVN

SEQ ID NO: 87226 - protein, 9 aa, synthetic construct
  source 1..9: note = Seed: VVVGAGDVG (KRAS G13D)
FVVWANDVP

SEQ ID NO: 87227 - protein, 9 aa, synthetic construct
  source 1..9: note = Seed: VVVGAGDVG (KRAS G13D)
FVVWANDVQ

SEQ ID NO: 87228 - protein, 9 aa, synthetic construct
  source 1..9: note = Seed: VVVGAGDVG (KRAS G13D)
FVVWANDVR

SEQ ID NO: 87229 - protein, 9 aa, synthetic construct
  source 1..9: note = Seed: VVVGAGDVG (KRAS G13D)
FVVWANDVS

SEQ ID NO: 87230 - protein, 9 aa, synthetic construct
  source 1..9: note = Seed: VVVGAGDVG (KRAS G13D)
FVVWANDVT

SEQ ID NO: 87231 - protein, 9 aa, synthetic construct
  source 1..9: note = Seed: VVVGAGDVG (KRAS G13D)
FVVWANDVV

SEQ ID NO: 87232 - protein, 9 aa, synthetic construct
  source 1..9: note = Seed: VVVGAGDVG (KRAS G13D)
FVVWANDVW

SEQ ID NO: 87233 - protein, 9 aa, synthetic construct
  source 1..9: note = Seed: VVVGAGDVG (KRAS G13D)
FVVWANDVY

SEQ ID NO: 87234 - protein, 9 aa, synthetic construct
  source 1..9: note = Seed: VVVGAGDVG (KRAS G13D)
FVVWAPDVA

SEQ ID NO: 87235 - protein, 9 aa, synthetic construct
  source 1..9: note = Seed: VVVGAGDVG (KRAS G13D)
FVVWAPDVF

SEQ ID NO: 87236 - protein, 9 aa, synthetic construct
  source 1..9: note = Seed: VVVGAGDVG (KRAS G13D)
FVVWAPDVG

SEQ ID NO: 87237 - protein, 9 aa, synthetic construct
  source 1..9: note = Seed: VVVGAGDVG (KRAS G13D)
FVVWAPDVH

SEQ ID NO: 87238 - protein, 9 aa, synthetic construct
  source 1..9: note = Seed: VVVGAGDVG (KRAS G13D)
FVVWAPDVI

SEQ ID NO: 87239 - protein, 9 aa, synthetic construct
  source 1..9: note = Seed: VVVGAGDVG (KRAS G13D)
FVVWAPDVK

SEQ ID NO: 87240 - protein, 9 aa, synthetic construct
  source 1..9: note = Seed: VVVGAGDVG (KRAS G13D)
FVVWAPDVL

SEQ ID NO: 87241 - protein, 9 aa, synthetic construct
  source 1..9: note = Seed: VVVGAGDVG (KRAS G13D)
FVVWAPDVM

SEQ ID NO: 87242 - protein, 9 aa, synthetic construct
  source 1..9: note = Seed: VVVGAGDVG (KRAS G13D)
FVVWAPDVN

SEQ ID NO: 87243 - protein, 9 aa, synthetic construct
  source 1..9: note = Seed: VVVGAGDVG (KRAS G13D)
FVVWAPDVP

SEQ ID NO: 87244 - protein, 9 aa, synthetic construct
  source 1..9: note = Seed: VVVGAGDVG (KRAS G13D)
FVVWAPDVQ

SEQ ID NO: 87245 - protein, 9 aa, synthetic construct
  source 1..9: note = Seed: VVVGAGDVG (KRAS G13D)
FVVWAPDVR

SEQ ID NO: 87246 - protein, 9 aa, synthetic construct
  source 1..9: note = Seed: VVVGAGDVG (KRAS G13D)
FVVWAPDVS

SEQ ID NO: 87247 - protein, 9 aa, synthetic construct
  source 1..9: note = Seed: VVVGAGDVG (KRAS G13D)
FVVWAPDVT

SEQ ID NO: 87248 - protein, 9 aa, synthetic construct
  source 1..9: note = Seed: VVVGAGDVG (KRAS G13D)
FVVWAPDVV

SEQ ID NO: 87249 - protein, 9 aa, synthetic construct
  source 1..9: note = Seed: VVVGAGDVG (KRAS G13D)
FVVWAPDVW

SEQ ID NO: 87250 - protein, 9 aa, synthetic construct
  source 1..9: note = Seed: VVVGAGDVG (KRAS G13D)
FVVWAPDVY

SEQ ID NO: 87251 - protein, 9 aa, synthetic construct
  source 1..9: note = Seed: VVVGAGDVG (KRAS G13D)
FVVWAQDVA

SEQ ID NO: 87252 - protein, 9 aa, synthetic construct
  source 1..9: note = Seed: VVVGAGDVG (KRAS G13D)
FVVWAQDVF

SEQ ID NO: 87253 - protein, 9 aa, synthetic construct
  source 1..9: note = Seed: VVVGAGDVG (KRAS G13D)
FVVWAQDVI

SEQ ID NO: 87254 - protein, 9 aa, synthetic construct
  source 1..9: note = Seed: VVVGAGDVG (KRAS G13D)
FVVWAQDVL

SEQ ID NO: 87255 - protein, 9 aa, synthetic construct
  source 1..9: note = Seed: VVVGAGDVG (KRAS G13D)
FVVWAQDVM

SEQ ID NO: 87256 - protein, 9 aa, synthetic construct
  source 1..9: note = Seed: VVVGAGDVG (KRAS G13D)
FVVWAQDVS

SEQ ID NO: 87257 - protein, 9 aa, synthetic construct
  source 1..9: note = Seed: VVVGAGDVG (KRAS G13D)
FVVWAQDVV

SEQ ID NO: 87258 - protein, 9 aa, synthetic construct
  source 1..9: note = Seed: VVVGAGDVG (KRAS G13D)
FVVWAQDVW

SEQ ID NO: 87259 - protein, 9 aa, synthetic construct
  source 1..9: note = Seed: VVVGAGDVG (KRAS G13D)
FVVWAQDVY

SEQ ID NO: 87260 - protein, 9 aa, synthetic construct
  source 1..9: note = Seed: VVVGAGDVG (KRAS G13D)
FVVWASDVA

SEQ ID NO: 87261 - protein, 9 aa, synthetic construct
  source 1..9: note = Seed: VVVGAGDVG (KRAS G13D)
FVVWASDVF

SEQ ID NO: 87262 - protein, 9 aa, synthetic construct
  source 1..9: note = Seed: VVVGAGDVG (KRAS G13D)
FVVWASDVG

SEQ ID NO: 87263 - protein, 9 aa, synthetic construct
  source 1..9: note = Seed: VVVGAGDVG (KRAS G13D)
FVVWASDVH

SEQ ID NO: 87264 - protein, 9 aa, synthetic construct
  source 1..9: note = Seed: VVVGAGDVG (KRAS G13D)
FVVWASDVI

SEQ ID NO: 87265 - protein, 9 aa, synthetic construct
  source 1..9: note = Seed: VVVGAGDVG (KRAS G13D)
FVVWASDVK

SEQ ID NO: 87266 - protein, 9 aa, synthetic construct
  source 1..9: note = Seed: VVVGAGDVG (KRAS G13D)
FVVWASDVL

SEQ ID NO: 87267 - protein, 9 aa, synthetic construct
  source 1..9: note = Seed: VVVGAGDVG (KRAS G13D)
FVVWASDVM

SEQ ID NO: 87268 - protein, 9 aa, synthetic construct
  source 1..9: note = Seed: VVVGAGDVG (KRAS G13D)
FVVWASDVN

SEQ ID NO: 87269 - protein, 9 aa, synthetic construct
  source 1..9: note = Seed: VVVGAGDVG (KRAS G13D)
FVVWASDVP

SEQ ID NO: 87270 - protein, 9 aa, synthetic construct
  source 1..9: note = Seed: VVVGAGDVG (KRAS G13D)
FVVWASDVQ

SEQ ID NO: 87271 - protein, 9 aa, synthetic construct
  source 1..9: note = Seed: VVVGAGDVG (KRAS G13D)
FVVWASDVR

SEQ ID NO: 87272 - protein, 9 aa, synthetic construct
  source 1..9: note = Seed: VVVGAGDVG (KRAS G13D)
FVVWASDVS

SEQ ID NO: 87273 - protein, 9 aa, synthetic construct
  source 1..9: note = Seed: VVVGAGDVG (KRAS G13D)
FVVWASDVT

SEQ ID NO: 87274 - protein, 9 aa, synthetic construct
  source 1..9: note = Seed: VVVGAGDVG (KRAS G13D)
FVVWASDVV

SEQ ID NO: 87275 - protein, 9 aa, synthetic construct
  source 1..9: note = Seed: VVVGAGDVG (KRAS G13D)
FVVWASDVW

SEQ ID NO: 87276 - protein, 9 aa, synthetic construct
  source 1..9: note = Seed: VVVGAGDVG (KRAS G13D)
FVVWASDVY

SEQ ID NO: 87277 - protein, 9 aa, synthetic construct
  source 1..9: note = Seed: VVVGAGDVG (KRAS G13D)
FVVWATDVA

SEQ ID NO: 87278 - protein, 9 aa, synthetic construct
  source 1..9: note = Seed: VVVGAGDVG (KRAS G13D)
FVVWATDVF

SEQ ID NO: 87279 - protein, 9 aa, synthetic construct
  source 1..9: note = Seed: VVVGAGDVG (KRAS G13D)
FVVWATDVG

SEQ ID NO: 87280 - protein, 9 aa, synthetic construct
  source 1..9: note = Seed: VVVGAGDVG (KRAS G13D)
FVVWATDVH

SEQ ID NO: 87281 - protein, 9 aa, synthetic construct
  source 1..9: note = Seed: VVVGAGDVG (KRAS G13D)
FVVWATDVI

SEQ ID NO: 87282 - protein, 9 aa, synthetic construct
  source 1..9: note = Seed: VVVGAGDVG (KRAS G13D)
FVVWATDVL

SEQ ID NO: 87283 - protein, 9 aa, synthetic construct
  source 1..9: note = Seed: VVVGAGDVG (KRAS G13D)
FVVWATDVM

SEQ ID NO: 87284 - protein, 9 aa, synthetic construct
  source 1..9: note = Seed: VVVGAGDVG (KRAS G13D)
FVVWATDVN

SEQ ID NO: 87285 - protein, 9 aa, synthetic construct
  source 1..9: note = Seed: VVVGAGDVG (KRAS G13D)
FVVWATDVQ

SEQ ID NO: 87286 - protein, 9 aa, synthetic construct
  source 1..9: note = Seed: VVVGAGDVG (KRAS G13D)
FVVWATDVS

SEQ ID NO: 87287 - protein, 9 aa, synthetic construct
  source 1..9: note = Seed: VVVGAGDVG (KRAS G13D)
FVVWATDVT

SEQ ID NO: 87288 - protein, 9 aa, synthetic construct
  source 1..9: note = Seed: VVVGAGDVG (KRAS G13D)
FVVWATDVV

SEQ ID NO: 87289 - protein, 9 aa, synthetic construct
  source 1..9: note = Seed: VVVGAGDVG (KRAS G13D)
FVVWATDVY

SEQ ID NO: 87290 - protein, 9 aa, synthetic construct
  source 1..9: note = Seed: VVVGAGDVG (KRAS G13D)
FVVWAVDVA

SEQ ID NO: 87291 - protein, 9 aa, synthetic construct
  source 1..9: note = Seed: VVVGAGDVG (KRAS G13D)
FVVWAVDVD

SEQ ID NO: 87292 - protein, 9 aa, synthetic construct
  source 1..9: note = Seed: VVVGAGDVG (KRAS G13D)
FVVWAVDVE

SEQ ID NO: 87293 - protein, 9 aa, synthetic construct
  source 1..9: note = Seed: VVVGAGDVG (KRAS G13D)
FVVWAVDVF

SEQ ID NO: 87294 - protein, 9 aa, synthetic construct
  source 1..9: note = Seed: VVVGAGDVG (KRAS G13D)
FVVWAVDVG

SEQ ID NO: 87295 - protein, 9 aa, synthetic construct
  source 1..9: note = Seed: VVVGAGDVG (KRAS G13D)
FVVWAVDVH

SEQ ID NO: 87296 - protein, 9 aa, synthetic construct
  source 1..9: note = Seed: VVVGAGDVG (KRAS G13D)
FVVWAVDVI

SEQ ID NO: 87297 - protein, 9 aa, synthetic construct
  source 1..9: note = Seed: VVVGAGDVG (KRAS G13D)
FVVWAVDVK

SEQ ID NO: 87298 - protein, 9 aa, synthetic construct
  source 1..9: note = Seed: VVVGAGDVG (KRAS G13D)
FVVWAVDVL

SEQ ID NO: 87299 - protein, 9 aa, synthetic construct
  source 1..9: note = Seed: VVVGAGDVG (KRAS G13D)
FVVWAVDVM

SEQ ID NO: 87300 - protein, 9 aa, synthetic construct
  source 1..9: note = Seed: VVVGAGDVG (KRAS G13D)
FVVWAVDVN

SEQ ID NO: 87301 - protein, 9 aa, synthetic construct
  source 1..9: note = Seed: VVVGAGDVG (KRAS G13D)
FVVWAVDVQ

SEQ ID NO: 87302 - protein, 9 aa, synthetic construct
  source 1..9: note = Seed: VVVGAGDVG (KRAS G13D)
FVVWAVDVR

SEQ ID NO: 87303 - protein, 9 aa, synthetic construct
  source 1..9: note = Seed: VVVGAGDVG (KRAS G13D)
FVVWAVDVS

SEQ ID NO: 87304 - protein, 9 aa, synthetic construct
  source 1..9: note = Seed: VVVGAGDVG (KRAS G13D)
FVVWAVDVT

SEQ ID NO: 87305 - protein, 9 aa, synthetic construct
  source 1..9: note = Seed: VVVGAGDVG (KRAS G13D)
FVVWAVDVV

SEQ ID NO: 87306 - protein, 9 aa, synthetic construct
  source 1..9: note = Seed: VVVGAGDVG (KRAS G13D)
FVVWAVDVY

SEQ ID NO: 87307 - protein, 9 aa, synthetic construct
  source 1..9: note = Seed: VVVGAGDVG (KRAS G13D)
FVVYAADVA

SEQ ID NO: 87308 - protein, 9 aa, synthetic construct
  source 1..9: note = Seed: VVVGAGDVG (KRAS G13D)
FVVYAADVC

SEQ ID NO: 87309 - protein, 9 aa, synthetic construct
  source 1..9: note = Seed: VVVGAGDVG (KRAS G13D)
FVVYAADVD

SEQ ID NO: 87310 - protein, 9 aa, synthetic construct
  source 1..9: note = Seed: VVVGAGDVG (KRAS G13D)
FVVYAADVE

SEQ ID NO: 87311 - protein, 9 aa, synthetic construct
  source 1..9: note = Seed: VVVGAGDVG (KRAS G13D)
FVVYAADVF

SEQ ID NO: 87312 - protein, 9 aa, synthetic construct
  source 1..9: note = Seed: VVVGAGDVG (KRAS G13D)
FVVYAADVG

SEQ ID NO: 87313 - protein, 9 aa, synthetic construct
  source 1..9: note = Seed: VVVGAGDVG (KRAS G13D)
FVVYAADVH

SEQ ID NO: 87314 - protein, 9 aa, synthetic construct
  source 1..9: note = Seed: VVVGAGDVG (KRAS G13D)
FVVYAADVI

SEQ ID NO: 87315 - protein, 9 aa, synthetic construct
  source 1..9: note = Seed: VVVGAGDVG (KRAS G13D)
FVVYAADVL

SEQ ID NO: 87316 - protein, 9 aa, synthetic construct
  source 1..9: note = Seed: VVVGAGDVG (KRAS G13D)
FVVYAADVM

SEQ ID NO: 87317 - protein, 9 aa, synthetic construct
  source 1..9: note = Seed: VVVGAGDVG (KRAS G13D)
FVVYAADVN

SEQ ID NO: 87318 - protein, 9 aa, synthetic construct
  source 1..9: note = Seed: VVVGAGDVG (KRAS G13D)
FVVYAADVQ

SEQ ID NO: 87319 - protein, 9 aa, synthetic construct
  source 1..9: note = Seed: VVVGAGDVG (KRAS G13D)
FVVYAADVR

SEQ ID NO: 87320 - protein, 9 aa, synthetic construct
  source 1..9: note = Seed: VVVGAGDVG (KRAS G13D)
FVVYAADVS

SEQ ID NO: 87321 - protein, 9 aa, synthetic construct
  source 1..9: note = Seed: VVVGAGDVG (KRAS G13D)
FVVYAADVT

SEQ ID NO: 87322 - protein, 9 aa, synthetic construct
  source 1..9: note = Seed: VVVGAGDVG (KRAS G13D)
FVVYAADVV

SEQ ID NO: 87323 - protein, 9 aa, synthetic construct
  source 1..9: note = Seed: VVVGAGDVG (KRAS G13D)
FVVYAADVY

SEQ ID NO: 87324 - protein, 9 aa, synthetic construct
  source 1..9: note = Seed: VVVGAGDVG (KRAS G13D)
FVVYADDVA

SEQ ID NO: 87325 - protein, 9 aa, synthetic construct
  source 1..9: note = Seed: VVVGAGDVG (KRAS G13D)
FVVYADDVC

SEQ ID NO: 87326 - protein, 9 aa, synthetic construct
  source 1..9: note = Seed: VVVGAGDVG (KRAS G13D)
FVVYADDVD

SEQ ID NO: 87327 - protein, 9 aa, synthetic construct
  source 1..9: note = Seed: VVVGAGDVG (KRAS G13D)
FVVYADDVE

SEQ ID NO: 87328 - protein, 9 aa, synthetic construct
  source 1..9: note = Seed: VVVGAGDVG (KRAS G13D)
FVVYADDVF

SEQ ID NO: 87329 - protein, 9 aa, synthetic construct
  source 1..9: note = Seed: VVVGAGDVG (KRAS G13D)
FVVYADDVG

SEQ ID NO: 87330 - protein, 9 aa, synthetic construct
  source 1..9: note = Seed: VVVGAGDVG (KRAS G13D)
FVVYADDVH

SEQ ID NO: 87331 - protein, 9 aa, synthetic construct
  source 1..9: note = Seed: VVVGAGDVG (KRAS G13D)
FVVYADDVI

SEQ ID NO: 87332 - protein, 9 aa, synthetic construct
  source 1..9: note = Seed: VVVGAGDVG (KRAS G13D)
FVVYADDVL

SEQ ID NO: 87333 - protein, 9 aa, synthetic construct
  source 1..9: note = Seed: VVVGAGDVG (KRAS G13D)
FVVYADDVM

SEQ ID NO: 87334 - protein, 9 aa, synthetic construct
  source 1..9: note = Seed: VVVGAGDVG (KRAS G13D)
FVVYADDVN

SEQ ID NO: 87335 - protein, 9 aa, synthetic construct
  source 1..9: note = Seed: VVVGAGDVG (KRAS G13D)
FVVYADDVP

SEQ ID NO: 87336 - protein, 9 aa, synthetic construct
  source 1..9: note = Seed: VVVGAGDVG (KRAS G13D)
FVVYADDVQ

SEQ ID NO: 87337 - protein, 9 aa, synthetic construct
  source 1..9: note = Seed: VVVGAGDVG (KRAS G13D)
FVVYADDVR

SEQ ID NO: 87338 - protein, 9 aa, synthetic construct
  source 1..9: note = Seed: VVVGAGDVG (KRAS G13D)
FVVYADDVS

SEQ ID NO: 87339 - protein, 9 aa, synthetic construct
  source 1..9: note = Seed: VVVGAGDVG (KRAS G13D)
FVVYADDVT

SEQ ID NO: 87340 - protein, 9 aa, synthetic construct
  source 1..9: note = Seed: VVVGAGDVG (KRAS G13D)
FVVYADDVV

SEQ ID NO: 87341 - protein, 9 aa, synthetic construct
  source 1..9: note = Seed: VVVGAGDVG (KRAS G13D)
FVVYADDVW

SEQ ID NO: 87342 - protein, 9 aa, synthetic construct
  source 1..9: note = Seed: VVVGAGDVG (KRAS G13D)
FVVYADDVY

SEQ ID NO: 87343 - protein, 9 aa, synthetic construct
  source 1..9: note = Seed: VVVGAGDVG (KRAS G13D)
FVVYAEDVA

SEQ ID NO: 87344 - protein, 9 aa, synthetic construct
  source 1..9: note = Seed: VVVGAGDVG (KRAS G13D)
FVVYAEDVI

SEQ ID NO: 87345 - protein, 9 aa, synthetic construct
  source 1..9: note = Seed: VVVGAGDVG (KRAS G13D)
FVVYAEDVL

SEQ ID NO: 87346 - protein, 9 aa, synthetic construct
  source 1..9: note = Seed: VVVGAGDVG (KRAS G13D)
FVVYAEDVV

SEQ ID NO: 87347 - protein, 9 aa, synthetic construct
  source 1..9: note = Seed: VVVGAGDVG (KRAS G13D)
FVVYAGDVA

SEQ ID NO: 87348 - protein, 9 aa, synthetic construct
  source 1..9: note = Seed: VVVGAGDVG (KRAS G13D)
FVVYAGDVM

SEQ ID NO: 87349 - protein, 9 aa, synthetic construct
  source 1..9: note = Seed: VVVGAGDVG (KRAS G13D)
FVVYAGDVN

SEQ ID NO: 87350 - protein, 9 aa, synthetic construct
  source 1..9: note = Seed: VVVGAGDVG (KRAS G13D)
FVVYAGDVS

SEQ ID NO: 87351 - protein, 9 aa, synthetic construct
  source 1..9: note = Seed: VVVGAGDVG (KRAS G13D)
FVVYAGDVV

SEQ ID NO: 87352 - protein, 9 aa, synthetic construct
  source 1..9: note = Seed: VVVGAGDVG (KRAS G13D)
FVVYAHDVA

SEQ ID NO: 87353 - protein, 9 aa, synthetic construct
  source 1..9: note = Seed: VVVGAGDVG (KRAS G13D)
FVVYAHDVI

SEQ ID NO: 87354 - protein, 9 aa, synthetic construct
  source 1..9: note = Seed: VVVGAGDVG (KRAS G13D)
FVVYAHDVL

SEQ ID NO: 87355 - protein, 9 aa, synthetic construct
  source 1..9: note = Seed: VVVGAGDVG (KRAS G13D)
FVVYAHDVM

SEQ ID NO: 87356 - protein, 9 aa, synthetic construct
  source 1..9: note = Seed: VVVGAGDVG (KRAS G13D)
FVVYAHDVS

SEQ ID NO: 87357 - protein, 9 aa, synthetic construct
  source 1..9: note = Seed: VVVGAGDVG (KRAS G13D)
FVVYAHDVV

SEQ ID NO: 87358 - protein, 9 aa, synthetic construct
  source 1..9: note = Seed: VVVGAGDVG (KRAS G13D)
FVVYAHDVY

SEQ ID NO: 87359 - protein, 9 aa, synthetic construct
  source 1..9: note = Seed: VVVGAGDVG (KRAS G13D)
FVVYAIDVA

SEQ ID NO: 87360 - protein, 9 aa, synthetic construct
  source 1..9: note = Seed: VVVGAGDVG (KRAS G13D)
FVVYAIDVD

SEQ ID NO: 87361 - protein, 9 aa, synthetic construct
  source 1..9: note = Seed: VVVGAGDVG (KRAS G13D)
FVVYAIDVE

SEQ ID NO: 87362 - protein, 9 aa, synthetic construct
  source 1..9: note = Seed: VVVGAGDVG (KRAS G13D)
FVVYAIDVF

SEQ ID NO: 87363 - protein, 9 aa, synthetic construct
  source 1..9: note = Seed: VVVGAGDVG (KRAS G13D)
FVVYAIDVG

SEQ ID NO: 87364 - protein, 9 aa, synthetic construct
  source 1..9: note = Seed: VVVGAGDVG (KRAS G13D)
FVVYAIDVI

SEQ ID NO: 87365 - protein, 9 aa, synthetic construct
  source 1..9: note = Seed: VVVGAGDVG (KRAS G13D)
FVVYAIDVL

SEQ ID NO: 87366 - protein, 9 aa, synthetic construct
  source 1..9: note = Seed: VVVGAGDVG (KRAS G13D)
FVVYAIDVM

SEQ ID NO: 87367 - protein, 9 aa, synthetic construct
  source 1..9: note = Seed: VVVGAGDVG (KRAS G13D)
FVVYAIDVN

SEQ ID NO: 87368 - protein, 9 aa, synthetic construct
  source 1..9: note = Seed: VVVGAGDVG (KRAS G13D)
FVVYAIDVQ

SEQ ID NO: 87369 - protein, 9 aa, synthetic construct
  source 1..9: note = Seed: VVVGAGDVG (KRAS G13D)
FVVYAIDVR

SEQ ID NO: 87370 - protein, 9 aa, synthetic construct
  source 1..9: note = Seed: VVVGAGDVG (KRAS G13D)
FVVYAIDVS

SEQ ID NO: 87371 - protein, 9 aa, synthetic construct
  source 1..9: note = Seed: VVVGAGDVG (KRAS G13D)
FVVYAIDVV

SEQ ID NO: 87372 - protein, 9 aa, synthetic construct
  source 1..9: note = Seed: VVVGAGDVG (KRAS G13D)
FVVYAIDVY

SEQ ID NO: 87373 - protein, 9 aa, synthetic construct
  source 1..9: note = Seed: VVVGAGDVG (KRAS G13D)
FVVYALDVA

SEQ ID NO: 87374 - protein, 9 aa, synthetic construct
  source 1..9: note = Seed: VVVGAGDVG (KRAS G13D)
FVVYALDVM

SEQ ID NO: 87375 - protein, 9 aa, synthetic construct
  source 1..9: note = Seed: VVVGAGDVG (KRAS G13D)
FVVYALDVQ

SEQ ID NO: 87376 - protein, 9 aa, synthetic construct
  source 1..9: note = Seed: VVVGAGDVG (KRAS G13D)
FVVYALDVV

SEQ ID NO: 87377 - protein, 9 aa, synthetic construct
  source 1..9: note = Seed: VVVGAGDVG (KRAS G13D)
FVVYALDVY

SEQ ID NO: 87378 - protein, 9 aa, synthetic construct
  source 1..9: note = Seed: VVVGAGDVG (KRAS G13D)
FVVYAMDVA

SEQ ID NO: 87379 - protein, 9 aa, synthetic construct
  source 1..9: note = Seed: VVVGAGDVG (KRAS G13D)
FVVYAMDVE

SEQ ID NO: 87380 - protein, 9 aa, synthetic construct
  source 1..9: note = Seed: VVVGAGDVG (KRAS G13D)
FVVYAMDVF

SEQ ID NO: 87381 - protein, 9 aa, synthetic construct
  source 1..9: note = Seed: VVVGAGDVG (KRAS G13D)
FVVYAMDVI

SEQ ID NO: 87382 - protein, 9 aa, synthetic construct
  source 1..9: note = Seed: VVVGAGDVG (KRAS G13D)
FVVYAMDVL

SEQ ID NO: 87383 - protein, 9 aa, synthetic construct
  source 1..9: note = Seed: VVVGAGDVG (KRAS G13D)
FVVYAMDVM

SEQ ID NO: 87384 - protein, 9 aa, synthetic construct
  source 1..9: note = Seed: VVVGAGDVG (KRAS G13D)
FVVYAMDVS

SEQ ID NO: 87385 - protein, 9 aa, synthetic construct
  source 1..9: note = Seed: VVVGAGDVG (KRAS G13D)
FVVYAMDVV

SEQ ID NO: 87386 - protein, 9 aa, synthetic construct
  source 1..9: note = Seed: VVVGAGDVG (KRAS G13D)
FVVYAMDVY

SEQ ID NO: 87387 - protein, 9 aa, synthetic construct
  source 1..9: note = Seed: VVVGAGDVG (KRAS G13D)
FVVYANDVA

SEQ ID NO: 87388 - protein, 9 aa, synthetic construct
  source 1..9: note = Seed: VVVGAGDVG (KRAS G13D)
FVVYANDVC

SEQ ID NO: 87389 - protein, 9 aa, synthetic construct
  source 1..9: note = Seed: VVVGAGDVG (KRAS G13D)
FVVYANDVD

SEQ ID NO: 87390 - protein, 9 aa, synthetic construct
  source 1..9: note = Seed: VVVGAGDVG (KRAS G13D)
FVVYANDVE

SEQ ID NO: 87391 - protein, 9 aa, synthetic construct
  source 1..9: note = Seed: VVVGAGDVG (KRAS G13D)
FVVYANDVF

SEQ ID NO: 87392 - protein, 9 aa, synthetic construct
  source 1..9: note = Seed: VVVGAGDVG (KRAS G13D)
FVVYANDVG

SEQ ID NO: 87393 - protein, 9 aa, synthetic construct
  source 1..9: note = Seed: VVVGAGDVG (KRAS G13D)
FVVYANDVH

SEQ ID NO: 87394 - protein, 9 aa, synthetic construct
  source 1..9: note = Seed: VVVGAGDVG (KRAS G13D)
FVVYANDVI

SEQ ID NO: 87395 - protein, 9 aa, synthetic construct
  source 1..9: note = Seed: VVVGAGDVG (KRAS G13D)
FVVYANDVK

SEQ ID NO: 87396 - protein, 9 aa, synthetic construct
  source 1..9: note = Seed: VVVGAGDVG (KRAS G13D)
FVVYANDVL

SEQ ID NO: 87397 - protein, 9 aa, synthetic construct
  source 1..9: note = Seed: VVVGAGDVG (KRAS G13D)
FVVYANDVM

SEQ ID NO: 87398 - protein, 9 aa, synthetic construct
  source 1..9: note = Seed: VVVGAGDVG (KRAS G13D)
FVVYANDVN

SEQ ID NO: 87399 - protein, 9 aa, synthetic construct
  source 1..9: note = Seed: VVVGAGDVG (KRAS G13D)
FVVYANDVP

SEQ ID NO: 87400 - protein, 9 aa, synthetic construct
  source 1..9: note = Seed: VVVGAGDVG (KRAS G13D)
FVVYANDVQ

SEQ ID NO: 87401 - protein, 9 aa, synthetic construct
  source 1..9: note = Seed: VVVGAGDVG (KRAS G13D)
FVVYANDVR

SEQ ID NO: 87402 - protein, 9 aa, synthetic construct
  source 1..9: note = Seed: VVVGAGDVG (KRAS G13D)
FVVYANDVS

SEQ ID NO: 87403 - protein, 9 aa, synthetic construct
  source 1..9: note = Seed: VVVGAGDVG (KRAS G13D)
FVVYANDVT

SEQ ID NO: 87404 - protein, 9 aa, synthetic construct
  source 1..9: note = Seed: VVVGAGDVG (KRAS G13D)
FVVYANDVV

SEQ ID NO: 87405 - protein, 9 aa, synthetic construct
  source 1..9: note = Seed: VVVGAGDVG (KRAS G13D)
FVVYANDVW

SEQ ID NO: 87406 - protein, 9 aa, synthetic construct
  source 1..9: note = Seed: VVVGAGDVG (KRAS G13D)
FVVYANDVY

SEQ ID NO: 87407 - protein, 9 aa, synthetic construct
  source 1..9: note = Seed: VVVGAGDVG (KRAS G13D)
FVVYAPDVA

SEQ ID NO: 87408 - protein, 9 aa, synthetic construct
  source 1..9: note = Seed: VVVGAGDVG (KRAS G13D)
FVVYAPDVF

SEQ ID NO: 87409 - protein, 9 aa, synthetic construct
  source 1..9: note = Seed: VVVGAGDVG (KRAS G13D)
FVVYAPDVG

SEQ ID NO: 87410 - protein, 9 aa, synthetic construct
  source 1..9: note = Seed: VVVGAGDVG (KRAS G13D)
FVVYAPDVH

SEQ ID NO: 87411 - protein, 9 aa, synthetic construct
  source 1..9: note = Seed: VVVGAGDVG (KRAS G13D)
FVVYAPDVI

SEQ ID NO: 87412 - protein, 9 aa, synthetic construct
  source 1..9: note = Seed: VVVGAGDVG (KRAS G13D)
FVVYAPDVL

SEQ ID NO: 87413 - protein, 9 aa, synthetic construct
  source 1..9: note = Seed: VVVGAGDVG (KRAS G13D)
FVVYAPDVM

SEQ ID NO: 87414 - protein, 9 aa, synthetic construct
  source 1..9: note = Seed: VVVGAGDVG (KRAS G13D)
FVVYAPDVN

SEQ ID NO: 87415 - protein, 9 aa, synthetic construct
  source 1..9: note = Seed: VVVGAGDVG (KRAS G13D)
FVVYAPDVQ

SEQ ID NO: 87416 - protein, 9 aa, synthetic construct
  source 1..9: note = Seed: VVVGAGDVG (KRAS G13D)
FVVYAPDVR

SEQ ID NO: 87417 - protein, 9 aa, synthetic construct
  source 1..9: note = Seed: VVVGAGDVG (KRAS G13D)
FVVYAPDVS

SEQ ID NO: 87418 - protein, 9 aa, synthetic construct
  source 1..9: note = Seed: VVVGAGDVG (KRAS G13D)
FVVYAPDVT

SEQ ID NO: 87419 - protein, 9 aa, synthetic construct
  source 1..9: note = Seed: VVVGAGDVG (KRAS G13D)
FVVYAPDVV

SEQ ID NO: 87420 - protein, 9 aa, synthetic construct
  source 1..9: note = Seed: VVVGAGDVG (KRAS G13D)
FVVYAPDVW

SEQ ID NO: 87421 - protein, 9 aa, synthetic construct
  source 1..9: note = Seed: VVVGAGDVG (KRAS G13D)
FVVYAPDVY

SEQ ID NO: 87422 - protein, 9 aa, synthetic construct
  source 1..9: note = Seed: VVVGAGDVG (KRAS G13D)
FVVYAQDVA

SEQ ID NO: 87423 - protein, 9 aa, synthetic construct
  source 1..9: note = Seed: VVVGAGDVG (KRAS G13D)
FVVYAQDVF

SEQ ID NO: 87424 - protein, 9 aa, synthetic construct
  source 1..9: note = Seed: VVVGAGDVG (KRAS G13D)
FVVYAQDVI

SEQ ID NO: 87425 - protein, 9 aa, synthetic construct
  source 1..9: note = Seed: VVVGAGDVG (KRAS G13D)
FVVYAQDVL

SEQ ID NO: 87426 - protein, 9 aa, synthetic construct
  source 1..9: note = Seed: VVVGAGDVG (KRAS G13D)
FVVYAQDVM

SEQ ID NO: 87427 - protein, 9 aa, synthetic construct
  source 1..9: note = Seed: VVVGAGDVG (KRAS G13D)
FVVYAQDVV

SEQ ID NO: 87428 - protein, 9 aa, synthetic construct
  source 1..9: note = Seed: VVVGAGDVG (KRAS G13D)
FVVYAQDVY

SEQ ID NO: 87429 - protein, 9 aa, synthetic construct
  source 1..9: note = Seed: VVVGAGDVG (KRAS G13D)
FVVYASDVA

SEQ ID NO: 87430 - protein, 9 aa, synthetic construct
  source 1..9: note = Seed: VVVGAGDVG (KRAS G13D)
FVVYASDVE

SEQ ID NO: 87431 - protein, 9 aa, synthetic construct
  source 1..9: note = Seed: VVVGAGDVG (KRAS G13D)
FVVYASDVF

SEQ ID NO: 87432 - protein, 9 aa, synthetic construct
  source 1..9: note = Seed: VVVGAGDVG (KRAS G13D)
FVVYASDVG

SEQ ID NO: 87433 - protein, 9 aa, synthetic construct
  source 1..9: note = Seed: VVVGAGDVG (KRAS G13D)
FVVYASDVH

SEQ ID NO: 87434 - protein, 9 aa, synthetic construct
  source 1..9: note = Seed: VVVGAGDVG (KRAS G13D)
FVVYASDVI

SEQ ID NO: 87435 - protein, 9 aa, synthetic construct
  source 1..9: note = Seed: VVVGAGDVG (KRAS G13D)
FVVYASDVL

SEQ ID NO: 87436 - protein, 9 aa, synthetic construct
  source 1..9: note = Seed: VVVGAGDVG (KRAS G13D)
FVVYASDVM

SEQ ID NO: 87437 - protein, 9 aa, synthetic construct
  source 1..9: note = Seed: VVVGAGDVG (KRAS G13D)
FVVYASDVN

SEQ ID NO: 87438 - protein, 9 aa, synthetic construct
  source 1..9: note = Seed: VVVGAGDVG (KRAS G13D)
FVVYASDVQ

SEQ ID NO: 87439 - protein, 9 aa, synthetic construct
  source 1..9: note = Seed: VVVGAGDVG (KRAS G13D)
FVVYASDVS

SEQ ID NO: 87440 - protein, 9 aa, synthetic construct
  source 1..9: note = Seed: VVVGAGDVG (KRAS G13D)
FVVYASDVT

SEQ ID NO: 87441 - protein, 9 aa, synthetic construct
  source 1..9: note = Seed: VVVGAGDVG (KRAS G13D)
FVVYASDVV

SEQ ID NO: 87442 - protein, 9 aa, synthetic construct
  source 1..9: note = Seed: VVVGAGDVG (KRAS G13D)
FVVYASDVY

SEQ ID NO: 87443 - protein, 9 aa, synthetic construct
  source 1..9: note = Seed: VVVGAGDVG (KRAS G13D)
FVVYATDVA

SEQ ID NO: 87444 - protein, 9 aa, synthetic construct
  source 1..9: note = Seed: VVVGAGDVG (KRAS G13D)
FVVYATDVF

SEQ ID NO: 87445 - protein, 9 aa, synthetic construct
  source 1..9: note = Seed: VVVGAGDVG (KRAS G13D)
FVVYATDVG

SEQ ID NO: 87446 - protein, 9 aa, synthetic construct
  source 1..9: note = Seed: VVVGAGDVG (KRAS G13D)
FVVYATDVH

SEQ ID NO: 87447 - protein, 9 aa, synthetic construct
  source 1..9: note = Seed: VVVGAGDVG (KRAS G13D)
FVVYATDVI

SEQ ID NO: 87448 - protein, 9 aa, synthetic construct
  source 1..9: note = Seed: VVVGAGDVG (KRAS G13D)
FVVYATDVK

SEQ ID NO: 87449 - protein, 9 aa, synthetic construct
  source 1..9: note = Seed: VVVGAGDVG (KRAS G13D)
FVVYATDVL

SEQ ID NO: 87450 - protein, 9 aa, synthetic construct
  source 1..9: note = Seed: VVVGAGDVG (KRAS G13D)
FVVYATDVM

SEQ ID NO: 87451 - protein, 9 aa, synthetic construct
  source 1..9: note = Seed: VVVGAGDVG (KRAS G13D)
FVVYATDVN

SEQ ID NO: 87452 - protein, 9 aa, synthetic construct
  source 1..9: note = Seed: VVVGAGDVG (KRAS G13D)
FVVYATDVQ

SEQ ID NO: 87453 - protein, 9 aa, synthetic construct
  source 1..9: note = Seed: VVVGAGDVG (KRAS G13D)
FVVYATDVR

SEQ ID NO: 87454 - protein, 9 aa, synthetic construct
  source 1..9: note = Seed: VVVGAGDVG (KRAS G13D)
FVVYATDVS

SEQ ID NO: 87455 - protein, 9 aa, synthetic construct
  source 1..9: note = Seed: VVVGAGDVG (KRAS G13D)
FVVYATDVT

SEQ ID NO: 87456 - protein, 9 aa, synthetic construct
  source 1..9: note = Seed: VVVGAGDVG (KRAS G13D)
FVVYATDVV

SEQ ID NO: 87457 - protein, 9 aa, synthetic construct
  source 1..9: note = Seed: VVVGAGDVG (KRAS G13D)
FVVYATDVY

SEQ ID NO: 87458 - protein, 9 aa, synthetic construct
  source 1..9: note = Seed: VVVGAGDVG (KRAS G13D)
FVVYAVDVA

SEQ ID NO: 87459 - protein, 9 aa, synthetic construct
  source 1..9: note = Seed: VVVGAGDVG (KRAS G13D)
FVVYAVDVG

SEQ ID NO: 87460 - protein, 9 aa, synthetic construct
  source 1..9: note = Seed: VVVGAGDVG (KRAS G13D)
FVVYAVDVH

SEQ ID NO: 87461 - protein, 9 aa, synthetic construct
  source 1..9: note = Seed: VVVGAGDVG (KRAS G13D)
FVVYAVDVI

SEQ ID NO: 87462 - protein, 9 aa, synthetic construct
  source 1..9: note = Seed: VVVGAGDVG (KRAS G13D)
FVVYAVDVL

SEQ ID NO: 87463 - protein, 9 aa, synthetic construct
  source 1..9: note = Seed: VVVGAGDVG (KRAS G13D)
FVVYAVDVM

SEQ ID NO: 87464 - protein, 9 aa, synthetic construct
  source 1..9: note = Seed: VVVGAGDVG (KRAS G13D)
FVVYAVDVN

SEQ ID NO: 87465 - protein, 9 aa, synthetic construct
  source 1..9: note = Seed: VVVGAGDVG (KRAS G13D)
FVVYAVDVQ

SEQ ID NO: 87466 - protein, 9 aa, synthetic construct
  source 1..9: note = Seed: VVVGAGDVG (KRAS G13D)
FVVYAVDVR

SEQ ID NO: 87467 - protein, 9 aa, synthetic construct
  source 1..9: note = Seed: VVVGAGDVG (KRAS G13D)
FVVYAVDVS

SEQ ID NO: 87468 - protein, 9 aa, synthetic construct
  source 1..9: note = Seed: VVVGAGDVG (KRAS G13D)
FVVYAVDVV

SEQ ID NO: 87469 - protein, 9 aa, synthetic construct
  source 1..9: note = Seed: VVVGAGDVG (KRAS G13D)
FVVYAVDVY

SEQ ID NO: 87470 - protein, 9 aa, synthetic construct
  source 1..9: note = Seed: VVVGAGDVG (KRAS G13D)
GVVWANDVA

SEQ ID NO: 87471 - protein, 9 aa, synthetic construct
  source 1..9: note = Seed: VVVGAGDVG (KRAS G13D)
GVVWANDVI

SEQ ID NO: 87472 - protein, 9 aa, synthetic construct
  source 1..9: note = Seed: VVVGAGDVG (KRAS G13D)
GVVWANDVM

SEQ ID NO: 87473 - protein, 9 aa, synthetic construct
  source 1..9: note = Seed: VVVGAGDVG (KRAS G13D)
GVVWANDVV

SEQ ID NO: 87474 - protein, 9 aa, synthetic construct
  source 1..9: note = Seed: VVVGAGDVG (KRAS G13D)
HVVFAADVA

SEQ ID NO: 87475 - protein, 9 aa, synthetic construct
  source 1..9: note = Seed: VVVGAGDVG (KRAS G13D)
HVVFAADVI

SEQ ID NO: 87476 - protein, 9 aa, synthetic construct
  source 1..9: note = Seed: VVVGAGDVG (KRAS G13D)
HVVFAADVL

SEQ ID NO: 87477 - protein, 9 aa, synthetic construct
  source 1..9: note = Seed: VVVGAGDVG (KRAS G13D)
HVVFAADVM

SEQ ID NO: 87478 - protein, 9 aa, synthetic construct
  source 1..9: note = Seed: VVVGAGDVG (KRAS G13D)
HVVFAADVV

SEQ ID NO: 87479 - protein, 9 aa, synthetic construct
  source 1..9: note = Seed: VVVGAGDVG (KRAS G13D)
HVVFADDVA

SEQ ID NO: 87480 - protein, 9 aa, synthetic construct
  source 1..9: note = Seed: VVVGAGDVG (KRAS G13D)
HVVFADDVF

SEQ ID NO: 87481 - protein, 9 aa, synthetic construct
  source 1..9: note = Seed: VVVGAGDVG (KRAS G13D)
HVVFADDVI

SEQ ID NO: 87482 - protein, 9 aa, synthetic construct
  source 1..9: note = Seed: VVVGAGDVG (KRAS G13D)
HVVFADDVL

SEQ ID NO: 87483 - protein, 9 aa, synthetic construct
  source 1..9: note = Seed: VVVGAGDVG (KRAS G13D)
HVVFADDVV

SEQ ID NO: 87484 - protein, 9 aa, synthetic construct
  source 1..9: note = Seed: VVVGAGDVG (KRAS G13D)
HVVFAIDVA

SEQ ID NO: 87485 - protein, 9 aa, synthetic construct
  source 1..9: note = Seed: VVVGAGDVG (KRAS G13D)
HVVFAIDVI

SEQ ID NO: 87486 - protein, 9 aa, synthetic construct
  source 1..9: note = Seed: VVVGAGDVG (KRAS G13D)
HVVFAIDVM

SEQ ID NO: 87487 - protein, 9 aa, synthetic construct
  source 1..9: note = Seed: VVVGAGDVG (KRAS G13D)
HVVFAIDVS

SEQ ID NO: 87488 - protein, 9 aa, synthetic construct
  source 1..9: note = Seed: VVVGAGDVG (KRAS G13D)
HVVFAIDVV

SEQ ID NO: 87489 - protein, 9 aa, synthetic construct
  source 1..9: note = Seed: VVVGAGDVG (KRAS G13D)
HVVFALDVA

SEQ ID NO: 87490 - protein, 9 aa, synthetic construct
  source 1..9: note = Seed: VVVGAGDVG (KRAS G13D)
HVVFALDVI

SEQ ID NO: 87491 - protein, 9 aa, synthetic construct
  source 1..9: note = Seed: VVVGAGDVG (KRAS G13D)
HVVFALDVM

SEQ ID NO: 87492 - protein, 9 aa, synthetic construct
  source 1..9: note = Seed: VVVGAGDVG (KRAS G13D)
HVVFALDVV

SEQ ID NO: 87493 - protein, 9 aa, synthetic construct
  source 1..9: note = Seed: VVVGAGDVG (KRAS G13D)
HVVFAMDVA

SEQ ID NO: 87494 - protein, 9 aa, synthetic construct
  source 1..9: note = Seed: VVVGAGDVG (KRAS G13D)
HVVFAMDVM

SEQ ID NO: 87495 - protein, 9 aa, synthetic construct
  source 1..9: note = Seed: VVVGAGDVG (KRAS G13D)
HVVFAMDVS

SEQ ID NO: 87496 - protein, 9 aa, synthetic construct
  source 1..9: note = Seed: VVVGAGDVG (KRAS G13D)
HVVFAMDVV

SEQ ID NO: 87497 - protein, 9 aa, synthetic construct
  source 1..9: note = Seed: VVVGAGDVG (KRAS G13D)
HVVFANDVA

SEQ ID NO: 87498 - protein, 9 aa, synthetic construct
  source 1..9: note = Seed: VVVGAGDVG (KRAS G13D)
HVVFANDVI

SEQ ID NO: 87499 - protein, 9 aa, synthetic construct
  source 1..9: note = Seed: VVVGAGDVG (KRAS G13D)
HVVFANDVL

SEQ ID NO: 87500 - protein, 9 aa, synthetic construct
  source 1..9: note = Seed: VVVGAGDVG (KRAS G13D)
HVVFANDVM

SEQ ID NO: 87501 - protein, 9 aa, synthetic construct
  source 1..9: note = Seed: VVVGAGDVG (KRAS G13D)
HVVFANDVQ

SEQ ID NO: 87502 - protein, 9 aa, synthetic construct
  source 1..9: note = Seed: VVVGAGDVG (KRAS G13D)
HVVFANDVS

SEQ ID NO: 87503 - protein, 9 aa, synthetic construct
  source 1..9: note = Seed: VVVGAGDVG (KRAS G13D)
HVVFANDVV

SEQ ID NO: 87504 - protein, 9 aa, synthetic construct
  source 1..9: note = Seed: VVVGAGDVG (KRAS G13D)
HVVFAPDVI

SEQ ID NO: 87505 - protein, 9 aa, synthetic construct
  source 1..9: note = Seed: VVVGAGDVG (KRAS G13D)
HVVFAPDVL

SEQ ID NO: 87506 - protein, 9 aa, synthetic construct
  source 1..9: note = Seed: VVVGAGDVG (KRAS G13D)
HVVFAPDVV

SEQ ID NO: 87507 - protein, 9 aa, synthetic construct
  source 1..9: note = Seed: VVVGAGDVG (KRAS G13D)
HVVFASDVA

SEQ ID NO: 87508 - protein, 9 aa, synthetic construct
  source 1..9: note = Seed: VVVGAGDVG (KRAS G13D)
HVVFASDVF

SEQ ID NO: 87509 - protein, 9 aa, synthetic construct
  source 1..9: note = Seed: VVVGAGDVG (KRAS G13D)
HVVFASDVI

SEQ ID NO: 87510 - protein, 9 aa, synthetic construct
  source 1..9: note = Seed: VVVGAGDVG (KRAS G13D)
HVVFASDVL

SEQ ID NO: 87511 - protein, 9 aa, synthetic construct
  source 1..9: note = Seed: VVVGAGDVG (KRAS G13D)
HVVFASDVM

SEQ ID NO: 87512 - protein, 9 aa, synthetic construct
  source 1..9: note = Seed: VVVGAGDVG (KRAS G13D)
HVVFASDVV

SEQ ID NO: 87513 - protein, 9 aa, synthetic construct
  source 1..9: note = Seed: VVVGAGDVG (KRAS G13D)
HVVFATDVL

SEQ ID NO: 87514 - protein, 9 aa, synthetic construct
  source 1..9: note = Seed: VVVGAGDVG (KRAS G13D)
HVVFAVDVA

SEQ ID NO: 87515 - protein, 9 aa, synthetic construct
  source 1..9: note = Seed: VVVGAGDVG (KRAS G13D)
HVVFAVDVI

SEQ ID NO: 87516 - protein, 9 aa, synthetic construct
  source 1..9: note = Seed: VVVGAGDVG (KRAS G13D)
HVVFAVDVL

SEQ ID NO: 87517 - protein, 9 aa, synthetic construct
  source 1..9: note = Seed: VVVGAGDVG (KRAS G13D)
HVVFAVDVM

SEQ ID NO: 87518 - protein, 9 aa, synthetic construct
  source 1..9: note = Seed: VVVGAGDVG (KRAS G13D)
HVVFAVDVV

SEQ ID NO: 87519 - protein, 9 aa, synthetic construct
  source 1..9: note = Seed: VVVGAGDVG (KRAS G13D)
HVVIAADVG

SEQ ID NO: 87520 - protein, 9 aa, synthetic construct
  source 1..9: note = Seed: VVVGAGDVG (KRAS G13D)
HVVIAADVI

SEQ ID NO: 87521 - protein, 9 aa, synthetic construct
  source 1..9: note = Seed: VVVGAGDVG (KRAS G13D)
HVVIAADVL

SEQ ID NO: 87522 - protein, 9 aa, synthetic construct
  source 1..9: note = Seed: VVVGAGDVG (KRAS G13D)
HVVIAADVV

SEQ ID NO: 87523 - protein, 9 aa, synthetic construct
  source 1..9: note = Seed: VVVGAGDVG (KRAS G13D)
HVVIANDVI

SEQ ID NO: 87524 - protein, 9 aa, synthetic construct
  source 1..9: note = Seed: VVVGAGDVG (KRAS G13D)
HVVIANDVV

SEQ ID NO: 87525 - protein, 9 aa, synthetic construct
  source 1..9: note = Seed: VVVGAGDVG (KRAS G13D)
HVVIAPDVA

SEQ ID NO: 87526 - protein, 9 aa, synthetic construct
  source 1..9: note = Seed: VVVGAGDVG (KRAS G13D)
HVVIASDVL

SEQ ID NO: 87527 - protein, 9 aa, synthetic construct
  source 1..9: note = Seed: VVVGAGDVG (KRAS G13D)
HVVIATDVS

SEQ ID NO: 87528 - protein, 9 aa, synthetic construct
  source 1..9: note = Seed: VVVGAGDVG (KRAS G13D)
HVVLAADVA

SEQ ID NO: 87529 - protein, 9 aa, synthetic construct
  source 1..9: note = Seed: VVVGAGDVG (KRAS G13D)
HVVLAADVC

SEQ ID NO: 87530 - protein, 9 aa, synthetic construct
  source 1..9: note = Seed: VVVGAGDVG (KRAS G13D)
HVVLAADVG

SEQ ID NO: 87531 - protein, 9 aa, synthetic construct
  source 1..9: note = Seed: VVVGAGDVG (KRAS G13D)
HVVLAADVI

SEQ ID NO: 87532 - protein, 9 aa, synthetic construct
  source 1..9: note = Seed: VVVGAGDVG (KRAS G13D)
HVVLAADVS

SEQ ID NO: 87533 - protein, 9 aa, synthetic construct
  source 1..9: note = Seed: VVVGAGDVG (KRAS G13D)
HVVLAADVT

SEQ ID NO: 87534 - protein, 9 aa, synthetic construct
  source 1..9: note = Seed: VVVGAGDVG (KRAS G13D)
HVVLAADVV

SEQ ID NO: 87535 - protein, 9 aa, synthetic construct
  source 1..9: note = Seed: VVVGAGDVG (KRAS G13D)
HVVLAGDVA

SEQ ID NO: 87536 - protein, 9 aa, synthetic construct
  source 1..9: note = Seed: VVVGAGDVG (KRAS G13D)
HVVLAGDVS

SEQ ID NO: 87537 - protein, 9 aa, synthetic construct
  source 1..9: note = Seed: VVVGAGDVG (KRAS G13D)
HVVLAGDVV

SEQ ID NO: 87538 - protein, 9 aa, synthetic construct
  source 1..9: note = Seed: VVVGAGDVG (KRAS G13D)
HVVLANDVC

SEQ ID NO: 87539 - protein, 9 aa, synthetic construct
  source 1..9: note = Seed: VVVGAGDVG (KRAS G13D)
HVVLAPDVA

SEQ ID NO: 87540 - protein, 9 aa, synthetic construct
  source 1..9: note = Seed: VVVGAGDVG (KRAS G13D)
HVVLAPDVI

SEQ ID NO: 87541 - protein, 9 aa, synthetic construct
  source 1..9: note = Seed: VVVGAGDVG (KRAS G13D)
HVVLAPDVL

SEQ ID NO: 87542 - protein, 9 aa, synthetic construct
  source 1..9: note = Seed: VVVGAGDVG (KRAS G13D)
HVVLAPDVM

SEQ ID NO: 87543 - protein, 9 aa, synthetic construct
  source 1..9: note = Seed: VVVGAGDVG (KRAS G13D)
HVVLAPDVN

SEQ ID NO: 87544 - protein, 9 aa, synthetic construct
  source 1..9: note = Seed: VVVGAGDVG (KRAS G13D)
HVVLAPDVS

SEQ ID NO: 87545 - protein, 9 aa, synthetic construct
  source 1..9: note = Seed: VVVGAGDVG (KRAS G13D)
HVVLAPDVT

SEQ ID NO: 87546 - protein, 9 aa, synthetic construct
  source 1..9: note = Seed: VVVGAGDVG (KRAS G13D)
HVVLAPDVV

SEQ ID NO: 87547 - protein, 9 aa, synthetic construct
  source 1..9: note = Seed: VVVGAGDVG (KRAS G13D)
HVVLASDVA

SEQ ID NO: 87548 - protein, 9 aa, synthetic construct
  source 1..9: note = Seed: VVVGAGDVG (KRAS G13D)
HVVLASDVG

SEQ ID NO: 87549 - protein, 9 aa, synthetic construct
  source 1..9: note = Seed: VVVGAGDVG (KRAS G13D)
HVVLASDVI

SEQ ID NO: 87550 - protein, 9 aa, synthetic construct
  source 1..9: note = Seed: VVVGAGDVG (KRAS G13D)
HVVLASDVL

SEQ ID NO: 87551 - protein, 9 aa, synthetic construct
  source 1..9: note = Seed: VVVGAGDVG (KRAS G13D)
HVVLASDVN

SEQ ID NO: 87552 - protein, 9 aa, synthetic construct
  source 1..9: note = Seed: VVVGAGDVG (KRAS G13D)
HVVLASDVS

SEQ ID NO: 87553 - protein, 9 aa, synthetic construct
  source 1..9: note = Seed: VVVGAGDVG (KRAS G13D)
HVVLASDVT

SEQ ID NO: 87554 - protein, 9 aa, synthetic construct
  source 1..9: note = Seed: VVVGAGDVG (KRAS G13D)
HVVLASDVV

SEQ ID NO: 87555 - protein, 9 aa, synthetic construct
  source 1..9: note = Seed: VVVGAGDVG (KRAS G13D)
HVVLATDVA

SEQ ID NO: 87556 - protein, 9 aa, synthetic construct
  source 1..9: note = Seed: VVVGAGDVG (KRAS G13D)
HVVLATDVI

SEQ ID NO: 87557 - protein, 9 aa, synthetic construct
  source 1..9: note = Seed: VVVGAGDVG (KRAS G13D)
HVVLATDVM

SEQ ID NO: 87558 - protein, 9 aa, synthetic construct
  source 1..9: note = Seed: VVVGAGDVG (KRAS G13D)
HVVLATDVN

SEQ ID NO: 87559 - protein, 9 aa, synthetic construct
  source 1..9: note = Seed: VVVGAGDVG (KRAS G13D)
HVVLATDVS

SEQ ID NO: 87560 - protein, 9 aa, synthetic construct
  source 1..9: note = Seed: VVVGAGDVG (KRAS G13D)
HVVLATDVT

SEQ ID NO: 87561 - protein, 9 aa, synthetic construct
  source 1..9: note = Seed: VVVGAGDVG (KRAS G13D)
HVVLATDVV

SEQ ID NO: 87562 - protein, 9 aa, synthetic construct
  source 1..9: note = Seed: VVVGAGDVG (KRAS G13D)
HVVLAVDVS

SEQ ID NO: 87563 - protein, 9 aa, synthetic construct
  source 1..9: note = Seed: VVVGAGDVG (KRAS G13D)
HVVMAADVA

SEQ ID NO: 87564 - protein, 9 aa, synthetic construct
  source 1..9: note = Seed: VVVGAGDVG (KRAS G13D)
HVVMAADVC

SEQ ID NO: 87565 - protein, 9 aa, synthetic construct
  source 1..9: note = Seed: VVVGAGDVG (KRAS G13D)
HVVMAADVG

SEQ ID NO: 87566 - protein, 9 aa, synthetic construct
  source 1..9: note = Seed: VVVGAGDVG (KRAS G13D)
HVVMAADVI

SEQ ID NO: 87567 - protein, 9 aa, synthetic construct
  source 1..9: note = Seed: VVVGAGDVG (KRAS G13D)
HVVMAADVM

SEQ ID NO: 87568 - protein, 9 aa, synthetic construct
  source 1..9: note = Seed: VVVGAGDVG (KRAS G13D)
HVVMAADVN

SEQ ID NO: 87569 - protein, 9 aa, synthetic construct
  source 1..9: note = Seed: VVVGAGDVG (KRAS G13D)
HVVMAADVS

SEQ ID NO: 87570 - protein, 9 aa, synthetic construct
  source 1..9: note = Seed: VVVGAGDVG (KRAS G13D)
HVVMAADVT

SEQ ID NO: 87571 - protein, 9 aa, synthetic construct
  source 1..9: note = Seed: VVVGAGDVG (KRAS G13D)
HVVMAADVV

SEQ ID NO: 87572 - protein, 9 aa, synthetic construct
  source 1..9: note = Seed: VVVGAGDVG (KRAS G13D)
HVVMAGDVA

SEQ ID NO: 87573 - protein, 9 aa, synthetic construct
  source 1..9: note = Seed: VVVGAGDVG (KRAS G13D)
HVVMAGDVI

SEQ ID NO: 87574 - protein, 9 aa, synthetic construct
  source 1..9: note = Seed: VVVGAGDVG (KRAS G13D)
HVVMAGDVL

SEQ ID NO: 87575 - protein, 9 aa, synthetic construct
  source 1..9: note = Seed: VVVGAGDVG (KRAS G13D)
HVVMAGDVM

SEQ ID NO: 87576 - protein, 9 aa, synthetic construct
  source 1..9: note = Seed: VVVGAGDVG (KRAS G13D)
HVVMAGDVS

SEQ ID NO: 87577 - protein, 9 aa, synthetic construct
  source 1..9: note = Seed: VVVGAGDVG (KRAS G13D)
HVVMAGDVV

SEQ ID NO: 87578 - protein, 9 aa, synthetic construct
  source 1..9: note = Seed: VVVGAGDVG (KRAS G13D)
HVVMAIDVC

SEQ ID NO: 87579 - protein, 9 aa, synthetic construct
  source 1..9: note = Seed: VVVGAGDVG (KRAS G13D)
HVVMAIDVG

SEQ ID NO: 87580 - protein, 9 aa, synthetic construct
  source 1..9: note = Seed: VVVGAGDVG (KRAS G13D)
HVVMANDVA

SEQ ID NO: 87581 - protein, 9 aa, synthetic construct
  source 1..9: note = Seed: VVVGAGDVG (KRAS G13D)
HVVMANDVC

SEQ ID NO: 87582 - protein, 9 aa, synthetic construct
  source 1..9: note = Seed: VVVGAGDVG (KRAS G13D)
HVVMANDVV

SEQ ID NO: 87583 - protein, 9 aa, synthetic construct
  source 1..9: note = Seed: VVVGAGDVG (KRAS G13D)
HVVMAPDVA

SEQ ID NO: 87584 - protein, 9 aa, synthetic construct
  source 1..9: note = Seed: VVVGAGDVG (KRAS G13D)
HVVMAPDVI

SEQ ID NO: 87585 - protein, 9 aa, synthetic construct
  source 1..9: note = Seed: VVVGAGDVG (KRAS G13D)
HVVMAPDVL

SEQ ID NO: 87586 - protein, 9 aa, synthetic construct
  source 1..9: note = Seed: VVVGAGDVG (KRAS G13D)
HVVMAPDVM

SEQ ID NO: 87587 - protein, 9 aa, synthetic construct
  source 1..9: note = Seed: VVVGAGDVG (KRAS G13D)
HVVMAPDVN

SEQ ID NO: 87588 - protein, 9 aa, synthetic construct
  source 1..9: note = Seed: VVVGAGDVG (KRAS G13D)
HVVMAPDVS

SEQ ID NO: 87589 - protein, 9 aa, synthetic construct
  source 1..9: note = Seed: VVVGAGDVG (KRAS G13D)
HVVMAPDVT

SEQ ID NO: 87590 - protein, 9 aa, synthetic construct
  source 1..9: note = Seed: VVVGAGDVG (KRAS G13D)
HVVMAPDVV

SEQ ID NO: 87591 - protein, 9 aa, synthetic construct
  source 1..9: note = Seed: VVVGAGDVG (KRAS G13D)
HVVMASDVA

SEQ ID NO: 87592 - protein, 9 aa, synthetic construct
  source 1..9: note = Seed: VVVGAGDVG (KRAS G13D)
HVVMASDVC

SEQ ID NO: 87593 - protein, 9 aa, synthetic construct
  source 1..9: note = Seed: VVVGAGDVG (KRAS G13D)
HVVMASDVG

SEQ ID NO: 87594 - protein, 9 aa, synthetic construct
  source 1..9: note = Seed: VVVGAGDVG (KRAS G13D)
HVVMASDVI

SEQ ID NO: 87595 - protein, 9 aa, synthetic construct
  source 1..9: note = Seed: VVVGAGDVG (KRAS G13D)
HVVMASDVM

SEQ ID NO: 87596 - protein, 9 aa, synthetic construct
  source 1..9: note = Seed: VVVGAGDVG (KRAS G13D)
HVVMASDVN

SEQ ID NO: 87597 - protein, 9 aa, synthetic construct
  source 1..9: note = Seed: VVVGAGDVG (KRAS G13D)
HVVMASDVS

SEQ ID NO: 87598 - protein, 9 aa, synthetic construct
  source 1..9: note = Seed: VVVGAGDVG (KRAS G13D)
HVVMASDVT

SEQ ID NO: 87599 - protein, 9 aa, synthetic construct
  source 1..9: note = Seed: VVVGAGDVG (KRAS G13D)
HVVMASDVV

SEQ ID NO: 87600 - protein, 9 aa, synthetic construct
  source 1..9: note = Seed: VVVGAGDVG (KRAS G13D)
HVVMATDVA

SEQ ID NO: 87601 - protein, 9 aa, synthetic construct
  source 1..9: note = Seed: VVVGAGDVG (KRAS G13D)
HVVMATDVI

SEQ ID NO: 87602 - protein, 9 aa, synthetic construct
  source 1..9: note = Seed: VVVGAGDVG (KRAS G13D)
HVVMATDVL

SEQ ID NO: 87603 - protein, 9 aa, synthetic construct
  source 1..9: note = Seed: VVVGAGDVG (KRAS G13D)
HVVMATDVM

SEQ ID NO: 87604 - protein, 9 aa, synthetic construct
  source 1..9: note = Seed: VVVGAGDVG (KRAS G13D)
HVVMATDVN

SEQ ID NO: 87605 - protein, 9 aa, synthetic construct
  source 1..9: note = Seed: VVVGAGDVG (KRAS G13D)
HVVMATDVQ

SEQ ID NO: 87606 - protein, 9 aa, synthetic construct
  source 1..9: note = Seed: VVVGAGDVG (KRAS G13D)
HVVMATDVS

SEQ ID NO: 87607 - protein, 9 aa, synthetic construct
  source 1..9: note = Seed: VVVGAGDVG (KRAS G13D)
HVVMATDVT

SEQ ID NO: 87608 - protein, 9 aa, synthetic construct
  source 1..9: note = Seed: VVVGAGDVG (KRAS G13D)
HVVMATDVV

SEQ ID NO: 87609 - protein, 9 aa, synthetic construct
  source 1..9: note = Seed: VVVGAGDVG (KRAS G13D)
HVVMAVDVA

SEQ ID NO: 87610 - protein, 9 aa, synthetic construct
  source 1..9: note = Seed: VVVGAGDVG (KRAS G13D)
HVVMAVDVG

SEQ ID NO: 87611 - protein, 9 aa, synthetic construct
  source 1..9: note = Seed: VVVGAGDVG (KRAS G13D)
HVVMAVDVM

SEQ ID NO: 87612 - protein, 9 aa, synthetic construct
  source 1..9: note = Seed: VVVGAGDVG (KRAS G13D)
HVVMAVDVS

SEQ ID NO: 87613 - protein, 9 aa, synthetic construct
  source 1..9: note = Seed: VVVGAGDVG (KRAS G13D)
HVVMAVDVT

SEQ ID NO: 87614 - protein, 9 aa, synthetic construct
  source 1..9: note = Seed: VVVGAGDVG (KRAS G13D)
HVVMAVDVV

SEQ ID NO: 87615 - protein, 9 aa, synthetic construct
  source 1..9: note = Seed: VVVGAGDVG (KRAS G13D)
HVVWAADVA

SEQ ID NO: 87616 - protein, 9 aa, synthetic construct
  source 1..9: note = Seed: VVVGAGDVG (KRAS G13D)
HVVWAADVF

SEQ ID NO: 87617 - protein, 9 aa, synthetic construct
  source 1..9: note = Seed: VVVGAGDVG (KRAS G13D)
HVVWAADVI

SEQ ID NO: 87618 - protein, 9 aa, synthetic construct
  source 1..9: note = Seed: VVVGAGDVG (KRAS G13D)
HVVWAADVL

SEQ ID NO: 87619 - protein, 9 aa, synthetic construct
  source 1..9: note = Seed: VVVGAGDVG (KRAS G13D)
HVVWAADVM

SEQ ID NO: 87620 - protein, 9 aa, synthetic construct
  source 1..9: note = Seed: VVVGAGDVG (KRAS G13D)
HVVWAADVS

SEQ ID NO: 87621 - protein, 9 aa, synthetic construct
  source 1..9: note = Seed: VVVGAGDVG (KRAS G13D)
HVVWAADVT

SEQ ID NO: 87622 - protein, 9 aa, synthetic construct
  source 1..9: note = Seed: VVVGAGDVG (KRAS G13D)
HVVWAADVV

SEQ ID NO: 87623 - protein, 9 aa, synthetic construct
  source 1..9: note = Seed: VVVGAGDVG (KRAS G13D)
HVVWADDVI

SEQ ID NO: 87624 - protein, 9 aa, synthetic construct
  source 1..9: note = Seed: VVVGAGDVG (KRAS G13D)
HVVWADDVL

SEQ ID NO: 87625 - protein, 9 aa, synthetic construct
  source 1..9: note = Seed: VVVGAGDVG (KRAS G13D)
HVVWADDVV

SEQ ID NO: 87626 - protein, 9 aa, synthetic construct
  source 1..9: note = Seed: VVVGAGDVG (KRAS G13D)
HVVWAIDVA

SEQ ID NO: 87627 - protein, 9 aa, synthetic construct
  source 1..9: note = Seed: VVVGAGDVG (KRAS G13D)
HVVWAIDVE

SEQ ID NO: 87628 - protein, 9 aa, synthetic construct
  source 1..9: note = Seed: VVVGAGDVG (KRAS G13D)
HVVWAIDVI

SEQ ID NO: 87629 - protein, 9 aa, synthetic construct
  source 1..9: note = Seed: VVVGAGDVG (KRAS G13D)
HVVWAIDVL

SEQ ID NO: 87630 - protein, 9 aa, synthetic construct
  source 1..9: note = Seed: VVVGAGDVG (KRAS G13D)
HVVWAIDVM

SEQ ID NO: 87631 - protein, 9 aa, synthetic construct
  source 1..9: note = Seed: VVVGAGDVG (KRAS G13D)
HVVWAIDVQ

SEQ ID NO: 87632 - protein, 9 aa, synthetic construct
  source 1..9: note = Seed: VVVGAGDVG (KRAS G13D)
HVVWAIDVS

SEQ ID NO: 87633 - protein, 9 aa, synthetic construct
  source 1..9: note = Seed: VVVGAGDVG (KRAS G13D)
HVVWAIDVT

SEQ ID NO: 87634 - protein, 9 aa, synthetic construct
  source 1..9: note = Seed: VVVGAGDVG (KRAS G13D)
HVVWAIDVV

SEQ ID NO: 87635 - protein, 9 aa, synthetic construct
  source 1..9: note = Seed: VVVGAGDVG (KRAS G13D)
HVVWALDVA

SEQ ID NO: 87636 - protein, 9 aa, synthetic construct
  source 1..9: note = Seed: VVVGAGDVG (KRAS G13D)
HVVWALDVI

SEQ ID NO: 87637 - protein, 9 aa, synthetic construct
  source 1..9: note = Seed: VVVGAGDVG (KRAS G13D)
HVVWALDVL

SEQ ID NO: 87638 - protein, 9 aa, synthetic construct
  source 1..9: note = Seed: VVVGAGDVG (KRAS G13D)
HVVWALDVM

SEQ ID NO: 87639 - protein, 9 aa, synthetic construct
  source 1..9: note = Seed: VVVGAGDVG (KRAS G13D)
HVVWALDVQ

SEQ ID NO: 87640 - protein, 9 aa, synthetic construct
  source 1..9: note = Seed: VVVGAGDVG (KRAS G13D)
HVVWALDVS

SEQ ID NO: 87641 - protein, 9 aa, synthetic construct
  source 1..9: note = Seed: VVVGAGDVG (KRAS G13D)
HVVWALDVV

SEQ ID NO: 87642 - protein, 9 aa, synthetic construct
  source 1..9: note = Seed: VVVGAGDVG (KRAS G13D)
HVVWALDVY

SEQ ID NO: 87643 - protein, 9 aa, synthetic construct
  source 1..9: note = Seed: VVVGAGDVG (KRAS G13D)
HVVWAMDVC

SEQ ID NO: 87644 - protein, 9 aa, synthetic construct
  source 1..9: note = Seed: VVVGAGDVG (KRAS G13D)
HVVWAMDVI

SEQ ID NO: 87645 - protein, 9 aa, synthetic construct
  source 1..9: note = Seed: VVVGAGDVG (KRAS G13D)
HVVWAMDVM

SEQ ID NO: 87646 - protein, 9 aa, synthetic construct
  source 1..9: note = Seed: VVVGAGDVG (KRAS G13D)
HVVWAMDVS

SEQ ID NO: 87647 - protein, 9 aa, synthetic construct
  source 1..9: note = Seed: VVVGAGDVG (KRAS G13D)
HVVWAMDVV

SEQ ID NO: 87648 - protein, 9 aa, synthetic construct
  source 1..9: note = Seed: VVVGAGDVG (KRAS G13D)
HVVWANDVA

SEQ ID NO: 87649 - protein, 9 aa, synthetic construct
  source 1..9: note = Seed: VVVGAGDVG (KRAS G13D)
HVVWANDVC

SEQ ID NO: 87650 - protein, 9 aa, synthetic construct
  source 1..9: note = Seed: VVVGAGDVG (KRAS G13D)
HVVWANDVI

SEQ ID NO: 87651 - protein, 9 aa, synthetic construct
  source 1..9: note = Seed: VVVGAGDVG (KRAS G13D)
HVVWANDVL

SEQ ID NO: 87652 - protein, 9 aa, synthetic construct
  source 1..9: note = Seed: VVVGAGDVG (KRAS G13D)
HVVWANDVM

SEQ ID NO: 87653 - protein, 9 aa, synthetic construct
  source 1..9: note = Seed: VVVGAGDVG (KRAS G13D)
HVVWANDVQ

SEQ ID NO: 87654 - protein, 9 aa, synthetic construct
  source 1..9: note = Seed: VVVGAGDVG (KRAS G13D)
HVVWANDVS

SEQ ID NO: 87655 - protein, 9 aa, synthetic construct
  source 1..9: note = Seed: VVVGAGDVG (KRAS G13D)
HVVWANDVV

SEQ ID NO: 87656 - protein, 9 aa, synthetic construct
  source 1..9: note = Seed: VVVGAGDVG (KRAS G13D)
HVVWAPDVI

SEQ ID NO: 87657 - protein, 9 aa, synthetic construct
  source 1..9: note = Seed: VVVGAGDVG (KRAS G13D)
HVVWAPDVL

SEQ ID NO: 87658 - protein, 9 aa, synthetic construct
  source 1..9: note = Seed: VVVGAGDVG (KRAS G13D)
HVVWAPDVV

SEQ ID NO: 87659 - protein, 9 aa, synthetic construct
  source 1..9: note = Seed: VVVGAGDVG (KRAS G13D)
HVVWASDVA

SEQ ID NO: 87660 - protein, 9 aa, synthetic construct
  source 1..9: note = Seed: VVVGAGDVG (KRAS G13D)
HVVWASDVF

SEQ ID NO: 87661 - protein, 9 aa, synthetic construct
  source 1..9: note = Seed: VVVGAGDVG (KRAS G13D)
HVVWASDVI

SEQ ID NO: 87662 - protein, 9 aa, synthetic construct
  source 1..9: note = Seed: VVVGAGDVG (KRAS G13D)
HVVWASDVL

SEQ ID NO: 87663 - protein, 9 aa, synthetic construct
  source 1..9: note = Seed: VVVGAGDVG (KRAS G13D)
HVVWASDVM

SEQ ID NO: 87664 - protein, 9 aa, synthetic construct
  source 1..9: note = Seed: VVVGAGDVG (KRAS G13D)
HVVWASDVV

SEQ ID NO: 87665 - protein, 9 aa, synthetic construct
  source 1..9: note = Seed: VVVGAGDVG (KRAS G13D)
HVVWATDVI

SEQ ID NO: 87666 - protein, 9 aa, synthetic construct
  source 1..9: note = Seed: VVVGAGDVG (KRAS G13D)
HVVWATDVL

SEQ ID NO: 87667 - protein, 9 aa, synthetic construct
  source 1..9: note = Seed: VVVGAGDVG (KRAS G13D)
HVVWATDVM

SEQ ID NO: 87668 - protein, 9 aa, synthetic construct
  source 1..9: note = Seed: VVVGAGDVG (KRAS G13D)
HVVWATDVV

SEQ ID NO: 87669 - protein, 9 aa, synthetic construct
  source 1..9: note = Seed: VVVGAGDVG (KRAS G13D)
HVVWAVDVA

SEQ ID NO: 87670 - protein, 9 aa, synthetic construct
  source 1..9: note = Seed: VVVGAGDVG (KRAS G13D)
HVVWAVDVI

SEQ ID NO: 87671 - protein, 9 aa, synthetic construct
  source 1..9: note = Seed: VVVGAGDVG (KRAS G13D)
HVVWAVDVL

SEQ ID NO: 87672 - protein, 9 aa, synthetic construct
  source 1..9: note = Seed: VVVGAGDVG (KRAS G13D)
HVVWAVDVM

SEQ ID NO: 87673 - protein, 9 aa, synthetic construct
  source 1..9: note = Seed: VVVGAGDVG (KRAS G13D)
HVVWAVDVQ

SEQ ID NO: 87674 - protein, 9 aa, synthetic construct
  source 1..9: note = Seed: VVVGAGDVG (KRAS G13D)
HVVWAVDVS

SEQ ID NO: 87675 - protein, 9 aa, synthetic construct
  source 1..9: note = Seed: VVVGAGDVG (KRAS G13D)
HVVWAVDVT

SEQ ID NO: 87676 - protein, 9 aa, synthetic construct
  source 1..9: note = Seed: VVVGAGDVG (KRAS G13D)
HVVWAVDVV

SEQ ID NO: 87677 - protein, 9 aa, synthetic construct
  source 1..9: note = Seed: VVVGAGDVG (KRAS G13D)
HVVYAADVA

SEQ ID NO: 87678 - protein, 9 aa, synthetic construct
  source 1..9: note = Seed: VVVGAGDVG (KRAS G13D)
HVVYAADVI

SEQ ID NO: 87679 - protein, 9 aa, synthetic construct
  source 1..9: note = Seed: VVVGAGDVG (KRAS G13D)
HVVYAADVL

SEQ ID NO: 87680 - protein, 9 aa, synthetic construct
  source 1..9: note = Seed: VVVGAGDVG (KRAS G13D)
HVVYAADVM

SEQ ID NO: 87681 - protein, 9 aa, synthetic construct
  source 1..9: note = Seed: VVVGAGDVG (KRAS G13D)
HVVYAADVS

SEQ ID NO: 87682 - protein, 9 aa, synthetic construct
  source 1..9: note = Seed: VVVGAGDVG (KRAS G13D)
HVVYAADVV

SEQ ID NO: 87683 - protein, 9 aa, synthetic construct
  source 1..9: note = Seed: VVVGAGDVG (KRAS G13D)
HVVYADDVL

SEQ ID NO: 87684 - protein, 9 aa, synthetic construct
  source 1..9: note = Seed: VVVGAGDVG (KRAS G13D)
HVVYAIDVA

SEQ ID NO: 87685 - protein, 9 aa, synthetic construct
  source 1..9: note = Seed: VVVGAGDVG (KRAS G13D)
HVVYAIDVC

SEQ ID NO: 87686 - protein, 9 aa, synthetic construct
  source 1..9: note = Seed: VVVGAGDVG (KRAS G13D)
HVVYAIDVI

SEQ ID NO: 87687 - protein, 9 aa, synthetic construct
  source 1..9: note = Seed: VVVGAGDVG (KRAS G13D)
HVVYAIDVL

SEQ ID NO: 87688 - protein, 9 aa, synthetic construct
  source 1..9: note = Seed: VVVGAGDVG (KRAS G13D)
HVVYAIDVM

SEQ ID NO: 87689 - protein, 9 aa, synthetic construct
  source 1..9: note = Seed: VVVGAGDVG (KRAS G13D)
HVVYAIDVS

SEQ ID NO: 87690 - protein, 9 aa, synthetic construct
  source 1..9: note = Seed: VVVGAGDVG (KRAS G13D)
HVVYAIDVV

SEQ ID NO: 87691 - protein, 9 aa, synthetic construct
  source 1..9: note = Seed: VVVGAGDVG (KRAS G13D)
HVVYALDVA

SEQ ID NO: 87692 - protein, 9 aa, synthetic construct
  source 1..9: note = Seed: VVVGAGDVG (KRAS G13D)
HVVYALDVL

SEQ ID NO: 87693 - protein, 9 aa, synthetic construct
  source 1..9: note = Seed: VVVGAGDVG (KRAS G13D)
HVVYALDVM

SEQ ID NO: 87694 - protein, 9 aa, synthetic construct
  source 1..9: note = Seed: VVVGAGDVG (KRAS G13D)
HVVYALDVQ

SEQ ID NO: 87695 - protein, 9 aa, synthetic construct
  source 1..9: note = Seed: VVVGAGDVG (KRAS G13D)
HVVYALDVS

SEQ ID NO: 87696 - protein, 9 aa, synthetic construct
  source 1..9: note = Seed: VVVGAGDVG (KRAS G13D)
HVVYAMDVA

SEQ ID NO: 87697 - protein, 9 aa, synthetic construct
  source 1..9: note = Seed: VVVGAGDVG (KRAS G13D)
HVVYAMDVM

SEQ ID NO: 87698 - protein, 9 aa, synthetic construct
  source 1..9: note = Seed: VVVGAGDVG (KRAS G13D)
HVVYAMDVS

SEQ ID NO: 87699 - protein, 9 aa, synthetic construct
  source 1..9: note = Seed: VVVGAGDVG (KRAS G13D)
HVVYANDVA

SEQ ID NO: 87700 - protein, 9 aa, synthetic construct
  source 1..9: note = Seed: VVVGAGDVG (KRAS G13D)
HVVYANDVI

SEQ ID NO: 87701 - protein, 9 aa, synthetic construct
  source 1..9: note = Seed: VVVGAGDVG (KRAS G13D)
HVVYANDVL

SEQ ID NO: 87702 - protein, 9 aa, synthetic construct
  source 1..9: note = Seed: VVVGAGDVG (KRAS G13D)
HVVYANDVV

SEQ ID NO: 87703 - protein, 9 aa, synthetic construct
  source 1..9: note = Seed: VVVGAGDVG (KRAS G13D)
HVVYASDVA

SEQ ID NO: 87704 - protein, 9 aa, synthetic construct
  source 1..9: note = Seed: VVVGAGDVG (KRAS G13D)
HVVYASDVF

SEQ ID NO: 87705 - protein, 9 aa, synthetic construct
  source 1..9: note = Seed: VVVGAGDVG (KRAS G13D)
HVVYASDVI

SEQ ID NO: 87706 - protein, 9 aa, synthetic construct
  source 1..9: note = Seed: VVVGAGDVG (KRAS G13D)
HVVYASDVL

SEQ ID NO: 87707 - protein, 9 aa, synthetic construct
  source 1..9: note = Seed: VVVGAGDVG (KRAS G13D)
HVVYASDVM

SEQ ID NO: 87708 - protein, 9 aa, synthetic construct
  source 1..9: note = Seed: VVVGAGDVG (KRAS G13D)
HVVYASDVV

SEQ ID NO: 87709 - protein, 9 aa, synthetic construct
  source 1..9: note = Seed: VVVGAGDVG (KRAS G13D)
HVVYAVDVA

SEQ ID NO: 87710 - protein, 9 aa, synthetic construct
  source 1..9: note = Seed: VVVGAGDVG (KRAS G13D)
HVVYAVDVI

SEQ ID NO: 87711 - protein, 9 aa, synthetic construct
  source 1..9: note = Seed: VVVGAGDVG (KRAS G13D)
HVVYAVDVL

SEQ ID NO: 87712 - protein, 9 aa, synthetic construct
  source 1..9: note = Seed: VVVGAGDVG (KRAS G13D)
HVVYAVDVM

SEQ ID NO: 87713 - protein, 9 aa, synthetic construct
  source 1..9: note = Seed: VVVGAGDVG (KRAS G13D)
HVVYAVDVQ

SEQ ID NO: 87714 - protein, 9 aa, synthetic construct
  source 1..9: note = Seed: VVVGAGDVG (KRAS G13D)
HVVYAVDVS

SEQ ID NO: 87715 - protein, 9 aa, synthetic construct
  source 1..9: note = Seed: VVVGAGDVG (KRAS G13D)
HVVYAVDVT

SEQ ID NO: 87716 - protein, 9 aa, synthetic construct
  source 1..9: note = Seed: VVVGAGDVG (KRAS G13D)
HVVYAVDVV

SEQ ID NO: 87717 - protein, 9 aa, synthetic construct
  source 1..9: note = Seed: VVVGAGDVG (KRAS G13D)
IVVAAADVA

SEQ ID NO: 87718 - protein, 9 aa, synthetic construct
  source 1..9: note = Seed: VVVGAGDVG (KRAS G13D)
IVVAAADVC

SEQ ID NO: 87719 - protein, 9 aa, synthetic construct
  source 1..9: note = Seed: VVVGAGDVG (KRAS G13D)
IVVAAADVD

SEQ ID NO: 87720 - protein, 9 aa, synthetic construct
  source 1..9: note = Seed: VVVGAGDVG (KRAS G13D)
IVVAAADVE

SEQ ID NO: 87721 - protein, 9 aa, synthetic construct
  source 1..9: note = Seed: VVVGAGDVG (KRAS G13D)
IVVAAADVF

SEQ ID NO: 87722 - protein, 9 aa, synthetic construct
  source 1..9: note = Seed: VVVGAGDVG (KRAS G13D)
IVVAAADVG

SEQ ID NO: 87723 - protein, 9 aa, synthetic construct
  source 1..9: note = Seed: VVVGAGDVG (KRAS G13D)
IVVAAADVH

SEQ ID NO: 87724 - protein, 9 aa, synthetic construct
  source 1..9: note = Seed: VVVGAGDVG (KRAS G13D)
IVVAAADVI

SEQ ID NO: 87725 - protein, 9 aa, synthetic construct
  source 1..9: note = Seed: VVVGAGDVG (KRAS G13D)
IVVAAADVL

SEQ ID NO: 87726 - protein, 9 aa, synthetic construct
  source 1..9: note = Seed: VVVGAGDVG (KRAS G13D)
IVVAAADVM

SEQ ID NO: 87727 - protein, 9 aa, synthetic construct
  source 1..9: note = Seed: VVVGAGDVG (KRAS G13D)
IVVAAADVN

SEQ ID NO: 87728 - protein, 9 aa, synthetic construct
  source 1..9: note = Seed: VVVGAGDVG (KRAS G13D)
IVVAAADVP

SEQ ID NO: 87729 - protein, 9 aa, synthetic construct
  source 1..9: note = Seed: VVVGAGDVG (KRAS G13D)
IVVAAADVQ

SEQ ID NO: 87730 - protein, 9 aa, synthetic construct
  source 1..9: note = Seed: VVVGAGDVG (KRAS G13D)
IVVAAADVS

SEQ ID NO: 87731 - protein, 9 aa, synthetic construct
  source 1..9: note = Seed: VVVGAGDVG (KRAS G13D)
IVVAAADVT

SEQ ID NO: 87732 - protein, 9 aa, synthetic construct
  source 1..9: note = Seed: VVVGAGDVG (KRAS G13D)
IVVAAADVV

SEQ ID NO: 87733 - protein, 9 aa, synthetic construct
  source 1..9: note = Seed: VVVGAGDVG (KRAS G13D)
IVVAAADVY

SEQ ID NO: 87734 - protein, 9 aa, synthetic construct
  source 1..9: note = Seed: VVVGAGDVG (KRAS G13D)
IVVAADDVA

SEQ ID NO: 87735 - protein, 9 aa, synthetic construct
  source 1..9: note = Seed: VVVGAGDVG (KRAS G13D)
IVVAADDVF

SEQ ID NO: 87736 - protein, 9 aa, synthetic construct
  source 1..9: note = Seed: VVVGAGDVG (KRAS G13D)
IVVAADDVG

SEQ ID NO: 87737 - protein, 9 aa, synthetic construct
  source 1..9: note = Seed: VVVGAGDVG (KRAS G13D)
IVVAADDVI

SEQ ID NO: 87738 - protein, 9 aa, synthetic construct
  source 1..9: note = Seed: VVVGAGDVG (KRAS G13D)
IVVAADDVL

SEQ ID NO: 87739 - protein, 9 aa, synthetic construct
  source 1..9: note = Seed: VVVGAGDVG (KRAS G13D)
IVVAADDVM

SEQ ID NO: 87740 - protein, 9 aa, synthetic construct
  source 1..9: note = Seed: VVVGAGDVG (KRAS G13D)
IVVAADDVN

SEQ ID NO: 87741 - protein, 9 aa, synthetic construct
  source 1..9: note = Seed: VVVGAGDVG (KRAS G13D)
IVVAADDVQ

SEQ ID NO: 87742 - protein, 9 aa, synthetic construct
  source 1..9: note = Seed: VVVGAGDVG (KRAS G13D)
IVVAADDVS

SEQ ID NO: 87743 - protein, 9 aa, synthetic construct
  source 1..9: note = Seed: VVVGAGDVG (KRAS G13D)
IVVAADDVT

SEQ ID NO: 87744 - protein, 9 aa, synthetic construct
  source 1..9: note = Seed: VVVGAGDVG (KRAS G13D)
IVVAADDVV

SEQ ID NO: 87745 - protein, 9 aa, synthetic construct
  source 1..9: note = Seed: VVVGAGDVG (KRAS G13D)
IVVAADDVY

SEQ ID NO: 87746 - protein, 9 aa, synthetic construct
  source 1..9: note = Seed: VVVGAGDVG (KRAS G13D)
IVVAAEDVN

SEQ ID NO: 87747 - protein, 9 aa, synthetic construct
  source 1..9: note = Seed: VVVGAGDVG (KRAS G13D)
IVVAAEDVQ

SEQ ID NO: 87748 - protein, 9 aa, synthetic construct
  source 1..9: note = Seed: VVVGAGDVG (KRAS G13D)
IVVAAEDVS

SEQ ID NO: 87749 - protein, 9 aa, synthetic construct
  source 1..9: note = Seed: VVVGAGDVG (KRAS G13D)
IVVAAGDVA

SEQ ID NO: 87750 - protein, 9 aa, synthetic construct
  source 1..9: note = Seed: VVVGAGDVG (KRAS G13D)
IVVAAGDVG

SEQ ID NO: 87751 - protein, 9 aa, synthetic construct
  source 1..9: note = Seed: VVVGAGDVG (KRAS G13D)
IVVAAGDVH

SEQ ID NO: 87752 - protein, 9 aa, synthetic construct
  source 1..9: note = Seed: VVVGAGDVG (KRAS G13D)
IVVAAGDVI

SEQ ID NO: 87753 - protein, 9 aa, synthetic construct
  source 1..9: note = Seed: VVVGAGDVG (KRAS G13D)
IVVAAGDVL

SEQ ID NO: 87754 - protein, 9 aa, synthetic construct
  source 1..9: note = Seed: VVVGAGDVG (KRAS G13D)
IVVAAGDVM

SEQ ID NO: 87755 - protein, 9 aa, synthetic construct
  source 1..9: note = Seed: VVVGAGDVG (KRAS G13D)
IVVAAGDVN

SEQ ID NO: 87756 - protein, 9 aa, synthetic construct
  source 1..9: note = Seed: VVVGAGDVG (KRAS G13D)
IVVAAGDVP

SEQ ID NO: 87757 - protein, 9 aa, synthetic construct
  source 1..9: note = Seed: VVVGAGDVG (KRAS G13D)
IVVAAGDVQ

SEQ ID NO: 87758 - protein, 9 aa, synthetic construct
  source 1..9: note = Seed: VVVGAGDVG (KRAS G13D)
IVVAAGDVS

SEQ ID NO: 87759 - protein, 9 aa, synthetic construct
  source 1..9: note = Seed: VVVGAGDVG (KRAS G13D)
IVVAAGDVT

SEQ ID NO: 87760 - protein, 9 aa, synthetic construct
  source 1..9: note = Seed: VVVGAGDVG (KRAS G13D)
IVVAAGDVV

SEQ ID NO: 87761 - protein, 9 aa, synthetic construct
  source 1..9: note = Seed: VVVGAGDVG (KRAS G13D)
IVVAAGDVY

SEQ ID NO: 87762 - protein, 9 aa, synthetic construct
  source 1..9: note = Seed: VVVGAGDVG (KRAS G13D)
IVVAAHDVA

SEQ ID NO: 87763 - protein, 9 aa, synthetic construct
  source 1..9: note = Seed: VVVGAGDVG (KRAS G13D)
IVVAAHDVS

SEQ ID NO: 87764 - protein, 9 aa, synthetic construct
  source 1..9: note = Seed: VVVGAGDVG (KRAS G13D)
IVVAAIDVA

SEQ ID NO: 87765 - protein, 9 aa, synthetic construct
  source 1..9: note = Seed: VVVGAGDVG (KRAS G13D)
IVVAAIDVG

SEQ ID NO: 87766 - protein, 9 aa, synthetic construct
  source 1..9: note = Seed: VVVGAGDVG (KRAS G13D)
IVVAAIDVH

SEQ ID NO: 87767 - protein, 9 aa, synthetic construct
  source 1..9: note = Seed: VVVGAGDVG (KRAS G13D)
IVVAAIDVI

SEQ ID NO: 87768 - protein, 9 aa, synthetic construct
  source 1..9: note = Seed: VVVGAGDVG (KRAS G13D)
IVVAAIDVM

SEQ ID NO: 87769 - protein, 9 aa, synthetic construct
  source 1..9: note = Seed: VVVGAGDVG (KRAS G13D)
IVVAAIDVN

SEQ ID NO: 87770 - protein, 9 aa, synthetic construct
  source 1..9: note = Seed: VVVGAGDVG (KRAS G13D)
IVVAAIDVQ

SEQ ID NO: 87771 - protein, 9 aa, synthetic construct
  source 1..9: note = Seed: VVVGAGDVG (KRAS G13D)
IVVAAIDVS

SEQ ID NO: 87772 - protein, 9 aa, synthetic construct
  source 1..9: note = Seed: VVVGAGDVG (KRAS G13D)
IVVAAIDVT

SEQ ID NO: 87773 - protein, 9 aa, synthetic construct
  source 1..9: note = Seed: VVVGAGDVG (KRAS G13D)
IVVAAIDVV

SEQ ID NO: 87774 - protein, 9 aa, synthetic construct
  source 1..9: note = Seed: VVVGAGDVG (KRAS G13D)
IVVAAIDVY

SEQ ID NO: 87775 - protein, 9 aa, synthetic construct
  source 1..9: note = Seed: VVVGAGDVG (KRAS G13D)
IVVAAKDVA

SEQ ID NO: 87776 - protein, 9 aa, synthetic construct
  source 1..9: note = Seed: VVVGAGDVG (KRAS G13D)
IVVAALDVA

SEQ ID NO: 87777 - protein, 9 aa, synthetic construct
  source 1..9: note = Seed: VVVGAGDVG (KRAS G13D)
IVVAALDVG

SEQ ID NO: 87778 - protein, 9 aa, synthetic construct
  source 1..9: note = Seed: VVVGAGDVG (KRAS G13D)
IVVAALDVM

SEQ ID NO: 87779 - protein, 9 aa, synthetic construct
  source 1..9: note = Seed: VVVGAGDVG (KRAS G13D)
IVVAALDVS

SEQ ID NO: 87780 - protein, 9 aa, synthetic construct
  source 1..9: note = Seed: VVVGAGDVG (KRAS G13D)
IVVAALDVY

SEQ ID NO: 87781 - protein, 9 aa, synthetic construct
  source 1..9: note = Seed: VVVGAGDVG (KRAS G13D)
IVVAAMDVS

SEQ ID NO: 87782 - protein, 9 aa, synthetic construct
  source 1..9: note = Seed: VVVGAGDVG (KRAS G13D)
IVVAAMDVY

SEQ ID NO: 87783 - protein, 9 aa, synthetic construct
  source 1..9: note = Seed: VVVGAGDVG (KRAS G13D)
IVVAANDVA

SEQ ID NO: 87784 - protein, 9 aa, synthetic construct
  source 1..9: note = Seed: VVVGAGDVG (KRAS G13D)
IVVAANDVC

SEQ ID NO: 87785 - protein, 9 aa, synthetic construct
  source 1..9: note = Seed: VVVGAGDVG (KRAS G13D)
IVVAANDVD

SEQ ID NO: 87786 - protein, 9 aa, synthetic construct
  source 1..9: note = Seed: VVVGAGDVG (KRAS G13D)
IVVAANDVE

SEQ ID NO: 87787 - protein, 9 aa, synthetic construct
  source 1..9: note = Seed: VVVGAGDVG (KRAS G13D)
IVVAANDVF

SEQ ID NO: 87788 - protein, 9 aa, synthetic construct
  source 1..9: note = Seed: VVVGAGDVG (KRAS G13D)
IVVAANDVG

SEQ ID NO: 87789 - protein, 9 aa, synthetic construct
  source 1..9: note = Seed: VVVGAGDVG (KRAS G13D)
IVVAANDVH

SEQ ID NO: 87790 - protein, 9 aa, synthetic construct
  source 1..9: note = Seed: VVVGAGDVG (KRAS G13D)
IVVAANDVI

SEQ ID NO: 87791 - protein, 9 aa, synthetic construct
  source 1..9: note = Seed: VVVGAGDVG (KRAS G13D)
IVVAANDVK

SEQ ID NO: 87792 - protein, 9 aa, synthetic construct
  source 1..9: note = Seed: VVVGAGDVG (KRAS G13D)
IVVAANDVL

SEQ ID NO: 87793 - protein, 9 aa, synthetic construct
  source 1..9: note = Seed: VVVGAGDVG (KRAS G13D)
IVVAANDVM

SEQ ID NO: 87794 - protein, 9 aa, synthetic construct
  source 1..9: note = Seed: VVVGAGDVG (KRAS G13D)
IVVAANDVN

SEQ ID NO: 87795 - protein, 9 aa, synthetic construct
  source 1..9: note = Seed: VVVGAGDVG (KRAS G13D)
IVVAANDVP

SEQ ID NO: 87796 - protein, 9 aa, synthetic construct
  source 1..9: note = Seed: VVVGAGDVG (KRAS G13D)
IVVAANDVQ

SEQ ID NO: 87797 - protein, 9 aa, synthetic construct
  source 1..9: note = Seed: VVVGAGDVG (KRAS G13D)
IVVAANDVR

SEQ ID NO: 87798 - protein, 9 aa, synthetic construct
  source 1..9: note = Seed: VVVGAGDVG (KRAS G13D)
IVVAANDVS

SEQ ID NO: 87799 - protein, 9 aa, synthetic construct
  source 1..9: note = Seed: VVVGAGDVG (KRAS G13D)
IVVAANDVT

SEQ ID NO: 87800 - protein, 9 aa, synthetic construct
  source 1..9: note = Seed: VVVGAGDVG (KRAS G13D)
IVVAANDVV

SEQ ID NO: 87801 - protein, 9 aa, synthetic construct
  source 1..9: note = Seed: VVVGAGDVG (KRAS G13D)
IVVAANDVW

SEQ ID NO: 87802 - protein, 9 aa, synthetic construct
  source 1..9: note = Seed: VVVGAGDVG (KRAS G13D)
IVVAANDVY

SEQ ID NO: 87803 - protein, 9 aa, synthetic construct
  source 1..9: note = Seed: VVVGAGDVG (KRAS G13D)
IVVAAPDVA

SEQ ID NO: 87804 - protein, 9 aa, synthetic construct
  source 1..9: note = Seed: VVVGAGDVG (KRAS G13D)
IVVAAPDVC

SEQ ID NO: 87805 - protein, 9 aa, synthetic construct
  source 1..9: note = Seed: VVVGAGDVG (KRAS G13D)
IVVAAPDVD

SEQ ID NO: 87806 - protein, 9 aa, synthetic construct
  source 1..9: note = Seed: VVVGAGDVG (KRAS G13D)
IVVAAPDVE

SEQ ID NO: 87807 - protein, 9 aa, synthetic construct
  source 1..9: note = Seed: VVVGAGDVG (KRAS G13D)
IVVAAPDVG

SEQ ID NO: 87808 - protein, 9 aa, synthetic construct
  source 1..9: note = Seed: VVVGAGDVG (KRAS G13D)
IVVAAPDVH

SEQ ID NO: 87809 - protein, 9 aa, synthetic construct
  source 1..9: note = Seed: VVVGAGDVG (KRAS G13D)
IVVAAPDVI

SEQ ID NO: 87810 - protein, 9 aa, synthetic construct
  source 1..9: note = Seed: VVVGAGDVG (KRAS G13D)
IVVAAPDVL

SEQ ID NO: 87811 - protein, 9 aa, synthetic construct
  source 1..9: note = Seed: VVVGAGDVG (KRAS G13D)
IVVAAPDVM

SEQ ID NO: 87812 - protein, 9 aa, synthetic construct
  source 1..9: note = Seed: VVVGAGDVG (KRAS G13D)
IVVAAPDVN

SEQ ID NO: 87813 - protein, 9 aa, synthetic construct
  source 1..9: note = Seed: VVVGAGDVG (KRAS G13D)
IVVAAPDVP

SEQ ID NO: 87814 - protein, 9 aa, synthetic construct
  source 1..9: note = Seed: VVVGAGDVG (KRAS G13D)
IVVAAPDVQ

SEQ ID NO: 87815 - protein, 9 aa, synthetic construct
  source 1..9: note = Seed: VVVGAGDVG (KRAS G13D)
IVVAAPDVS

SEQ ID NO: 87816 - protein, 9 aa, synthetic construct
  source 1..9: note = Seed: VVVGAGDVG (KRAS G13D)
IVVAAPDVT

SEQ ID NO: 87817 - protein, 9 aa, synthetic construct
  source 1..9: note = Seed: VVVGAGDVG (KRAS G13D)
IVVAAPDVV

SEQ ID NO: 87818 - protein, 9 aa, synthetic construct
  source 1..9: note = Seed: VVVGAGDVG (KRAS G13D)
IVVAAPDVY

SEQ ID NO: 87819 - protein, 9 aa, synthetic construct
  source 1..9: note = Seed: VVVGAGDVG (KRAS G13D)
IVVAAQDVS

SEQ ID NO: 87820 - protein, 9 aa, synthetic construct
  source 1..9: note = Seed: VVVGAGDVG (KRAS G13D)
IVVAASDVA

SEQ ID NO: 87821 - protein, 9 aa, synthetic construct
  source 1..9: note = Seed: VVVGAGDVG (KRAS G13D)
IVVAASDVC

SEQ ID NO: 87822 - protein, 9 aa, synthetic construct
  source 1..9: note = Seed: VVVGAGDVG (KRAS G13D)
IVVAASDVD

SEQ ID NO: 87823 - protein, 9 aa, synthetic construct
  source 1..9: note = Seed: VVVGAGDVG (KRAS G13D)
IVVAASDVE

SEQ ID NO: 87824 - protein, 9 aa, synthetic construct
  source 1..9: note = Seed: VVVGAGDVG (KRAS G13D)
IVVAASDVF

SEQ ID NO: 87825 - protein, 9 aa, synthetic construct
  source 1..9: note = Seed: VVVGAGDVG (KRAS G13D)
IVVAASDVG

SEQ ID NO: 87826 - protein, 9 aa, synthetic construct
  source 1..9: note = Seed: VVVGAGDVG (KRAS G13D)
IVVAASDVH

SEQ ID NO: 87827 - protein, 9 aa, synthetic construct
  source 1..9: note = Seed: VVVGAGDVG (KRAS G13D)
IVVAASDVI

SEQ ID NO: 87828 - protein, 9 aa, synthetic construct
  source 1..9: note = Seed: VVVGAGDVG (KRAS G13D)
IVVAASDVK

SEQ ID NO: 87829 - protein, 9 aa, synthetic construct
  source 1..9: note = Seed: VVVGAGDVG (KRAS G13D)
IVVAASDVL

SEQ ID NO: 87830 - protein, 9 aa, synthetic construct
  source 1..9: note = Seed: VVVGAGDVG (KRAS G13D)
IVVAASDVM

SEQ ID NO: 87831 - protein, 9 aa, synthetic construct
  source 1..9: note = Seed: VVVGAGDVG (KRAS G13D)
IVVAASDVN

SEQ ID NO: 87832 - protein, 9 aa, synthetic construct
  source 1..9: note = Seed: VVVGAGDVG (KRAS G13D)
IVVAASDVQ

SEQ ID NO: 87833 - protein, 9 aa, synthetic construct
  source 1..9: note = Seed: VVVGAGDVG (KRAS G13D)
IVVAASDVS

SEQ ID NO: 87834 - protein, 9 aa, synthetic construct
  source 1..9: note = Seed: VVVGAGDVG (KRAS G13D)
IVVAASDVT

SEQ ID NO: 87835 - protein, 9 aa, synthetic construct
  source 1..9: note = Seed: VVVGAGDVG (KRAS G13D)
IVVAASDVV

SEQ ID NO: 87836 - protein, 9 aa, synthetic construct
  source 1..9: note = Seed: VVVGAGDVG (KRAS G13D)
IVVAASDVY

SEQ ID NO: 87837 - protein, 9 aa, synthetic construct
  source 1..9: note = Seed: VVVGAGDVG (KRAS G13D)
IVVAATDVA

SEQ ID NO: 87838 - protein, 9 aa, synthetic construct
  source 1..9: note = Seed: VVVGAGDVG (KRAS G13D)
IVVAATDVC

SEQ ID NO: 87839 - protein, 9 aa, synthetic construct
  source 1..9: note = Seed: VVVGAGDVG (KRAS G13D)
IVVAATDVD

SEQ ID NO: 87840 - protein, 9 aa, synthetic construct
  source 1..9: note = Seed: VVVGAGDVG (KRAS G13D)
IVVAATDVE

SEQ ID NO: 87841 - protein, 9 aa, synthetic construct
  source 1..9: note = Seed: VVVGAGDVG (KRAS G13D)
IVVAATDVF

SEQ ID NO: 87842 - protein, 9 aa, synthetic construct
  source 1..9: note = Seed: VVVGAGDVG (KRAS G13D)
IVVAATDVG

SEQ ID NO: 87843 - protein, 9 aa, synthetic construct
  source 1..9: note = Seed: VVVGAGDVG (KRAS G13D)
IVVAATDVH

SEQ ID NO: 87844 - protein, 9 aa, synthetic construct
  source 1..9: note = Seed: VVVGAGDVG (KRAS G13D)
IVVAATDVI

SEQ ID NO: 87845 - protein, 9 aa, synthetic construct
  source 1..9: note = Seed: VVVGAGDVG (KRAS G13D)
IVVAATDVK

SEQ ID NO: 87846 - protein, 9 aa, synthetic construct
  source 1..9: note = Seed: VVVGAGDVG (KRAS G13D)
IVVAATDVL

SEQ ID NO: 87847 - protein, 9 aa, synthetic construct
  source 1..9: note = Seed: VVVGAGDVG (KRAS G13D)
IVVAATDVM

SEQ ID NO: 87848 - protein, 9 aa, synthetic construct
  source 1..9: note = Seed: VVVGAGDVG (KRAS G13D)
IVVAATDVN

SEQ ID NO: 87849 - protein, 9 aa, synthetic construct
  source 1..9: note = Seed: VVVGAGDVG (KRAS G13D)
IVVAATDVP

SEQ ID NO: 87850 - protein, 9 aa, synthetic construct
  source 1..9: note = Seed: VVVGAGDVG (KRAS G13D)
IVVAATDVQ

SEQ ID NO: 87851 - protein, 9 aa, synthetic construct
  source 1..9: note = Seed: VVVGAGDVG (KRAS G13D)
IVVAATDVR

SEQ ID NO: 87852 - protein, 9 aa, synthetic construct
  source 1..9: note = Seed: VVVGAGDVG (KRAS G13D)
IVVAATDVS

SEQ ID NO: 87853 - protein, 9 aa, synthetic construct
  source 1..9: note = Seed: VVVGAGDVG (KRAS G13D)
IVVAATDVT

SEQ ID NO: 87854 - protein, 9 aa, synthetic construct
  source 1..9: note = Seed: VVVGAGDVG (KRAS G13D)
IVVAATDVV

SEQ ID NO: 87855 - protein, 9 aa, synthetic construct
  source 1..9: note = Seed: VVVGAGDVG (KRAS G13D)
IVVAATDVY

SEQ ID NO: 87856 - protein, 9 aa, synthetic construct
  source 1..9: note = Seed: VVVGAGDVG (KRAS G13D)
IVVAAVDVA

SEQ ID NO: 87857 - protein, 9 aa, synthetic construct
  source 1..9: note = Seed: VVVGAGDVG (KRAS G13D)
IVVAAVDVE

SEQ ID NO: 87858 - protein, 9 aa, synthetic construct
  source 1..9: note = Seed: VVVGAGDVG (KRAS G13D)
IVVAAVDVG

SEQ ID NO: 87859 - protein, 9 aa, synthetic construct
  source 1..9: note = Seed: VVVGAGDVG (KRAS G13D)
IVVAAVDVH

SEQ ID NO: 87860 - protein, 9 aa, synthetic construct
  source 1..9: note = Seed: VVVGAGDVG (KRAS G13D)
IVVAAVDVI

SEQ ID NO: 87861 - protein, 9 aa, synthetic construct
  source 1..9: note = Seed: VVVGAGDVG (KRAS G13D)
IVVAAVDVK

SEQ ID NO: 87862 - protein, 9 aa, synthetic construct
  source 1..9: note = Seed: VVVGAGDVG (KRAS G13D)
IVVAAVDVL

SEQ ID NO: 87863 - protein, 9 aa, synthetic construct
  source 1..9: note = Seed: VVVGAGDVG (KRAS G13D)
IVVAAVDVM

SEQ ID NO: 87864 - protein, 9 aa, synthetic construct
  source 1..9: note = Seed: VVVGAGDVG (KRAS G13D)
IVVAAVDVN

SEQ ID NO: 87865 - protein, 9 aa, synthetic construct
  source 1..9: note = Seed: VVVGAGDVG (KRAS G13D)
IVVAAVDVQ

SEQ ID NO: 87866 - protein, 9 aa, synthetic construct
  source 1..9: note = Seed: VVVGAGDVG (KRAS G13D)
IVVAAVDVR

SEQ ID NO: 87867 - protein, 9 aa, synthetic construct
  source 1..9: note = Seed: VVVGAGDVG (KRAS G13D)
IVVAAVDVS

SEQ ID NO: 87868 - protein, 9 aa, synthetic construct
  source 1..9: note = Seed: VVVGAGDVG (KRAS G13D)
IVVAAVDVT

SEQ ID NO: 87869 - protein, 9 aa, synthetic construct
  source 1..9: note = Seed: VVVGAGDVG (KRAS G13D)
IVVAAVDVV

SEQ ID NO: 87870 - protein, 9 aa, synthetic construct
  source 1..9: note = Seed: VVVGAGDVG (KRAS G13D)
IVVAAVDVY

SEQ ID NO: 87871 - protein, 9 aa, synthetic construct
  source 1..9: note = Seed: VVVGAGDVG (KRAS G13D)
IVVCAADVA

SEQ ID NO: 87872 - protein, 9 aa, synthetic construct
  source 1..9: note = Seed: VVVGAGDVG (KRAS G13D)
IVVCAADVS

SEQ ID NO: 87873 - protein, 9 aa, synthetic construct
  source 1..9: note = Seed: VVVGAGDVG (KRAS G13D)
IVVCADDVA

SEQ ID NO: 87874 - protein, 9 aa, synthetic construct
  source 1..9: note = Seed: VVVGAGDVG (KRAS G13D)
IVVCAIDVA

SEQ ID NO: 87875 - protein, 9 aa, synthetic construct
  source 1..9: note = Seed: VVVGAGDVG (KRAS G13D)
IVVCALDVA

SEQ ID NO: 87876 - protein, 9 aa, synthetic construct
  source 1..9: note = Seed: VVVGAGDVG (KRAS G13D)
IVVCAMDVA

SEQ ID NO: 87877 - protein, 9 aa, synthetic construct
  source 1..9: note = Seed: VVVGAGDVG (KRAS G13D)
IVVCANDVA

SEQ ID NO: 87878 - protein, 9 aa, synthetic construct
  source 1..9: note = Seed: VVVGAGDVG (KRAS G13D)
IVVCANDVG

SEQ ID NO: 87879 - protein, 9 aa, synthetic construct
  source 1..9: note = Seed: VVVGAGDVG (KRAS G13D)
IVVCANDVH

SEQ ID NO: 87880 - protein, 9 aa, synthetic construct
  source 1..9: note = Seed: VVVGAGDVG (KRAS G13D)
IVVCANDVN

SEQ ID NO: 87881 - protein, 9 aa, synthetic construct
  source 1..9: note = Seed: VVVGAGDVG (KRAS G13D)
IVVCANDVQ

SEQ ID NO: 87882 - protein, 9 aa, synthetic construct
  source 1..9: note = Seed: VVVGAGDVG (KRAS G13D)
IVVCANDVS

SEQ ID NO: 87883 - protein, 9 aa, synthetic construct
  source 1..9: note = Seed: VVVGAGDVG (KRAS G13D)
IVVCANDVT

SEQ ID NO: 87884 - protein, 9 aa, synthetic construct
  source 1..9: note = Seed: VVVGAGDVG (KRAS G13D)
IVVCANDVV

SEQ ID NO: 87885 - protein, 9 aa, synthetic construct
  source 1..9: note = Seed: VVVGAGDVG (KRAS G13D)
IVVCASDVA

SEQ ID NO: 87886 - protein, 9 aa, synthetic construct
  source 1..9: note = Seed: VVVGAGDVG (KRAS G13D)
IVVCASDVQ

SEQ ID NO: 87887 - protein, 9 aa, synthetic construct
  source 1..9: note = Seed: VVVGAGDVG (KRAS G13D)
IVVCASDVS

SEQ ID NO: 87888 - protein, 9 aa, synthetic construct
  source 1..9: note = Seed: VVVGAGDVG (KRAS G13D)
IVVCATDVA

SEQ ID NO: 87889 - protein, 9 aa, synthetic construct
  source 1..9: note = Seed: VVVGAGDVG (KRAS G13D)
IVVCATDVS

SEQ ID NO: 87890 - protein, 9 aa, synthetic construct
  source 1..9: note = Seed: VVVGAGDVG (KRAS G13D)
IVVCAVDVA

SEQ ID NO: 87891 - protein, 9 aa, synthetic construct
  source 1..9: note = Seed: VVVGAGDVG (KRAS G13D)
IVVDAADVA

SEQ ID NO: 87892 - protein, 9 aa, synthetic construct
  source 1..9: note = Seed: VVVGAGDVG (KRAS G13D)
IVVDAADVI

SEQ ID NO: 87893 - protein, 9 aa, synthetic construct
  source 1..9: note = Seed: VVVGAGDVG (KRAS G13D)
IVVDAADVL

SEQ ID NO: 87894 - protein, 9 aa, synthetic construct
  source 1..9: note = Seed: VVVGAGDVG (KRAS G13D)
IVVDAADVM

SEQ ID NO: 87895 - protein, 9 aa, synthetic construct
  source 1..9: note = Seed: VVVGAGDVG (KRAS G13D)
IVVDAADVN

SEQ ID NO: 87896 - protein, 9 aa, synthetic construct
  source 1..9: note = Seed: VVVGAGDVG (KRAS G13D)
IVVDAADVQ

SEQ ID NO: 87897 - protein, 9 aa, synthetic construct
  source 1..9: note = Seed: VVVGAGDVG (KRAS G13D)
IVVDAADVS

SEQ ID NO: 87898 - protein, 9 aa, synthetic construct
  source 1..9: note = Seed: VVVGAGDVG (KRAS G13D)
IVVDAADVT

SEQ ID NO: 87899 - protein, 9 aa, synthetic construct
  source 1..9: note = Seed: VVVGAGDVG (KRAS G13D)
IVVDAADVV

SEQ ID NO: 87900 - protein, 9 aa, synthetic construct
  source 1..9: note = Seed: VVVGAGDVG (KRAS G13D)
IVVDAIDVA

SEQ ID NO: 87901 - protein, 9 aa, synthetic construct
  source 1..9: note = Seed: VVVGAGDVG (KRAS G13D)
IVVDAIDVI

SEQ ID NO: 87902 - protein, 9 aa, synthetic construct
  source 1..9: note = Seed: VVVGAGDVG (KRAS G13D)
IVVDAIDVL

SEQ ID NO: 87903 - protein, 9 aa, synthetic construct
  source 1..9: note = Seed: VVVGAGDVG (KRAS G13D)
IVVDAIDVM

SEQ ID NO: 87904 - protein, 9 aa, synthetic construct
  source 1..9: note = Seed: VVVGAGDVG (KRAS G13D)
IVVDAIDVV

SEQ ID NO: 87905 - protein, 9 aa, synthetic construct
  source 1..9: note = Seed: VVVGAGDVG (KRAS G13D)
IVVDAIDVY

SEQ ID NO: 87906 - protein, 9 aa, synthetic construct
  source 1..9: note = Seed: VVVGAGDVG (KRAS G13D)
IVVDALDVM

SEQ ID NO: 87907 - protein, 9 aa, synthetic construct
  source 1..9: note = Seed: VVVGAGDVG (KRAS G13D)
IVVDAMDVL

SEQ ID NO: 87908 - protein, 9 aa, synthetic construct
  source 1..9: note = Seed: VVVGAGDVG (KRAS G13D)
IVVDANDVA

SEQ ID NO: 87909 - protein, 9 aa, synthetic construct
  source 1..9: note = Seed: VVVGAGDVG (KRAS G13D)
IVVDANDVS

SEQ ID NO: 87910 - protein, 9 aa, synthetic construct
  source 1..9: note = Seed: VVVGAGDVG (KRAS G13D)
IVVDASDVA

SEQ ID NO: 87911 - protein, 9 aa, synthetic construct
  source 1..9: note = Seed: VVVGAGDVG (KRAS G13D)
IVVDASDVS

SEQ ID NO: 87912 - protein, 9 aa, synthetic construct
  source 1..9: note = Seed: VVVGAGDVG (KRAS G13D)
IVVDATDVA

SEQ ID NO: 87913 - protein, 9 aa, synthetic construct
  source 1..9: note = Seed: VVVGAGDVG (KRAS G13D)
IVVEAADVA

SEQ ID NO: 87914 - protein, 9 aa, synthetic construct
  source 1..9: note = Seed: VVVGAGDVG (KRAS G13D)
IVVEAADVD

SEQ ID NO: 87915 - protein, 9 aa, synthetic construct
  source 1..9: note = Seed: VVVGAGDVG (KRAS G13D)
IVVEAADVE

SEQ ID NO: 87916 - protein, 9 aa, synthetic construct
  source 1..9: note = Seed: VVVGAGDVG (KRAS G13D)
IVVEAADVG

SEQ ID NO: 87917 - protein, 9 aa, synthetic construct
  source 1..9: note = Seed: VVVGAGDVG (KRAS G13D)
IVVEAADVH

SEQ ID NO: 87918 - protein, 9 aa, synthetic construct
  source 1..9: note = Seed: VVVGAGDVG (KRAS G13D)
IVVEAADVI

SEQ ID NO: 87919 - protein, 9 aa, synthetic construct
  source 1..9: note = Seed: VVVGAGDVG (KRAS G13D)
IVVEAADVL

SEQ ID NO: 87920 - protein, 9 aa, synthetic construct
  source 1..9: note = Seed: VVVGAGDVG (KRAS G13D)
IVVEAADVM

SEQ ID NO: 87921 - protein, 9 aa, synthetic construct
  source 1..9: note = Seed: VVVGAGDVG (KRAS G13D)
IVVEAADVN

SEQ ID NO: 87922 - protein, 9 aa, synthetic construct
  source 1..9: note = Seed: VVVGAGDVG (KRAS G13D)
IVVEAADVQ

SEQ ID NO: 87923 - protein, 9 aa, synthetic construct
  source 1..9: note = Seed: VVVGAGDVG (KRAS G13D)
IVVEAADVS

SEQ ID NO: 87924 - protein, 9 aa, synthetic construct
  source 1..9: note = Seed: VVVGAGDVG (KRAS G13D)
IVVEAADVT

SEQ ID NO: 87925 - protein, 9 aa, synthetic construct
  source 1..9: note = Seed: VVVGAGDVG (KRAS G13D)
IVVEAADVV

SEQ ID NO: 87926 - protein, 9 aa, synthetic construct
  source 1..9: note = Seed: VVVGAGDVG (KRAS G13D)
IVVEAADVY

SEQ ID NO: 87927 - protein, 9 aa, synthetic construct
  source 1..9: note = Seed: VVVGAGDVG (KRAS G13D)
IVVEAGDVA

SEQ ID NO: 87928 - protein, 9 aa, synthetic construct
  source 1..9: note = Seed: VVVGAGDVG (KRAS G13D)
IVVEAIDVA

SEQ ID NO: 87929 - protein, 9 aa, synthetic construct
  source 1..9: note = Seed: VVVGAGDVG (KRAS G13D)
IVVEAIDVN

SEQ ID NO: 87930 - protein, 9 aa, synthetic construct
  source 1..9: note = Seed: VVVGAGDVG (KRAS G13D)
IVVEAIDVQ

SEQ ID NO: 87931 - protein, 9 aa, synthetic construct
  source 1..9: note = Seed: VVVGAGDVG (KRAS G13D)
IVVEAIDVS

SEQ ID NO: 87932 - protein, 9 aa, synthetic construct
  source 1..9: note = Seed: VVVGAGDVG (KRAS G13D)
IVVEANDVA

SEQ ID NO: 87933 - protein, 9 aa, synthetic construct
  source 1..9: note = Seed: VVVGAGDVG (KRAS G13D)
IVVEANDVC

SEQ ID NO: 87934 - protein, 9 aa, synthetic construct
  source 1..9: note = Seed: VVVGAGDVG (KRAS G13D)
IVVEANDVG

SEQ ID NO: 87935 - protein, 9 aa, synthetic construct
  source 1..9: note = Seed: VVVGAGDVG (KRAS G13D)
IVVEANDVI

SEQ ID NO: 87936 - protein, 9 aa, synthetic construct
  source 1..9: note = Seed: VVVGAGDVG (KRAS G13D)
IVVEANDVL

SEQ ID NO: 87937 - protein, 9 aa, synthetic construct
  source 1..9: note = Seed: VVVGAGDVG (KRAS G13D)
IVVEANDVM

SEQ ID NO: 87938 - protein, 9 aa, synthetic construct
  source 1..9: note = Seed: VVVGAGDVG (KRAS G13D)
IVVEANDVN

SEQ ID NO: 87939 - protein, 9 aa, synthetic construct
  source 1..9: note = Seed: VVVGAGDVG (KRAS G13D)
IVVEANDVQ

SEQ ID NO: 87940 - protein, 9 aa, synthetic construct
  source 1..9: note = Seed: VVVGAGDVG (KRAS G13D)
IVVEANDVS

SEQ ID NO: 87941 - protein, 9 aa, synthetic construct
  source 1..9: note = Seed: VVVGAGDVG (KRAS G13D)
IVVEANDVT

SEQ ID NO: 87942 - protein, 9 aa, synthetic construct
  source 1..9: note = Seed: VVVGAGDVG (KRAS G13D)
IVVEANDVV

SEQ ID NO: 87943 - protein, 9 aa, synthetic construct
  source 1..9: note = Seed: VVVGAGDVG (KRAS G13D)
IVVEANDVY

SEQ ID NO: 87944 - protein, 9 aa, synthetic construct
  source 1..9: note = Seed: VVVGAGDVG (KRAS G13D)
IVVEAPDVA

SEQ ID NO: 87945 - protein, 9 aa, synthetic construct
  source 1..9: note = Seed: VVVGAGDVG (KRAS G13D)
IVVEAPDVS

SEQ ID NO: 87946 - protein, 9 aa, synthetic construct
  source 1..9: note = Seed: VVVGAGDVG (KRAS G13D)
IVVEASDVA

SEQ ID NO: 87947 - protein, 9 aa, synthetic construct
  source 1..9: note = Seed: VVVGAGDVG (KRAS G13D)
IVVEASDVD

SEQ ID NO: 87948 - protein, 9 aa, synthetic construct
  source 1..9: note = Seed: VVVGAGDVG (KRAS G13D)
IVVEASDVE

SEQ ID NO: 87949 - protein, 9 aa, synthetic construct
  source 1..9: note = Seed: VVVGAGDVG (KRAS G13D)
IVVEASDVG

SEQ ID NO: 87950 - protein, 9 aa, synthetic construct
  source 1..9: note = Seed: VVVGAGDVG (KRAS G13D)
IVVEASDVH

SEQ ID NO: 87951 - protein, 9 aa, synthetic construct
  source 1..9: note = Seed: VVVGAGDVG (KRAS G13D)
IVVEASDVI

SEQ ID NO: 87952 - protein, 9 aa, synthetic construct
  source 1..9: note = Seed: VVVGAGDVG (KRAS G13D)
IVVEASDVL

SEQ ID NO: 87953 - protein, 9 aa, synthetic construct
  source 1..9: note = Seed: VVVGAGDVG (KRAS G13D)
IVVEASDVM

SEQ ID NO: 87954 - protein, 9 aa, synthetic construct
  source 1..9: note = Seed: VVVGAGDVG (KRAS G13D)
IVVEASDVN

SEQ ID NO: 87955 - protein, 9 aa, synthetic construct
  source 1..9: note = Seed: VVVGAGDVG (KRAS G13D)
IVVEASDVQ

SEQ ID NO: 87956 - protein, 9 aa, synthetic construct
  source 1..9: note = Seed: VVVGAGDVG (KRAS G13D)
IVVEASDVS

SEQ ID NO: 87957 - protein, 9 aa, synthetic construct
  source 1..9: note = Seed: VVVGAGDVG (KRAS G13D)
IVVEASDVT

SEQ ID NO: 87958 - protein, 9 aa, synthetic construct
  source 1..9: note = Seed: VVVGAGDVG (KRAS G13D)
IVVEASDVV

SEQ ID NO: 87959 - protein, 9 aa, synthetic construct
  source 1..9: note = Seed: VVVGAGDVG (KRAS G13D)
IVVEASDVY

SEQ ID NO: 87960 - protein, 9 aa, synthetic construct
  source 1..9: note = Seed: VVVGAGDVG (KRAS G13D)
IVVEATDVA

SEQ ID NO: 87961 - protein, 9 aa, synthetic construct
  source 1..9: note = Seed: VVVGAGDVG (KRAS G13D)
IVVEATDVH

SEQ ID NO: 87962 - protein, 9 aa, synthetic construct
  source 1..9: note = Seed: VVVGAGDVG (KRAS G13D)
IVVEATDVI

SEQ ID NO: 87963 - protein, 9 aa, synthetic construct
  source 1..9: note = Seed: VVVGAGDVG (KRAS G13D)
IVVEATDVL

SEQ ID NO: 87964 - protein, 9 aa, synthetic construct
  source 1..9: note = Seed: VVVGAGDVG (KRAS G13D)
IVVEATDVM

SEQ ID NO: 87965 - protein, 9 aa, synthetic construct
  source 1..9: note = Seed: VVVGAGDVG (KRAS G13D)
IVVEATDVN

SEQ ID NO: 87966 - protein, 9 aa, synthetic construct
  source 1..9: note = Seed: VVVGAGDVG (KRAS G13D)
IVVEATDVQ

SEQ ID NO: 87967 - protein, 9 aa, synthetic construct
  source 1..9: note = Seed: VVVGAGDVG (KRAS G13D)
IVVEATDVS

SEQ ID NO: 87968 - protein, 9 aa, synthetic construct
  source 1..9: note = Seed: VVVGAGDVG (KRAS G13D)
IVVEATDVT

SEQ ID NO: 87969 - protein, 9 aa, synthetic construct
  source 1..9: note = Seed: VVVGAGDVG (KRAS G13D)
IVVEATDVV

SEQ ID NO: 87970 - protein, 9 aa, synthetic construct
  source 1..9: note = Seed: VVVGAGDVG (KRAS G13D)
IVVEATDVY

SEQ ID NO: 87971 - protein, 9 aa, synthetic construct
  source 1..9: note = Seed: VVVGAGDVG (KRAS G13D)
IVVEAVDVA

SEQ ID NO: 87972 - protein, 9 aa, synthetic construct
  source 1..9: note = Seed: VVVGAGDVG (KRAS G13D)
IVVEAVDVH

SEQ ID NO: 87973 - protein, 9 aa, synthetic construct
  source 1..9: note = Seed: VVVGAGDVG (KRAS G13D)
IVVEAVDVN

SEQ ID NO: 87974 - protein, 9 aa, synthetic construct
  source 1..9: note = Seed: VVVGAGDVG (KRAS G13D)
IVVEAVDVQ

SEQ ID NO: 87975 - protein, 9 aa, synthetic construct
  source 1..9: note = Seed: VVVGAGDVG (KRAS G13D)
IVVEAVDVS

SEQ ID NO: 87976 - protein, 9 aa, synthetic construct
  source 1..9: note = Seed: VVVGAGDVG (KRAS G13D)
IVVFAADVA

SEQ ID NO: 87977 - protein, 9 aa, synthetic construct
  source 1..9: note = Seed: VVVGAGDVG (KRAS G13D)
IVVFAADVE

SEQ ID NO: 87978 - protein, 9 aa, synthetic construct
  source 1..9: note = Seed: VVVGAGDVG (KRAS G13D)
IVVFAADVF

SEQ ID NO: 87979 - protein, 9 aa, synthetic construct
  source 1..9: note = Seed: VVVGAGDVG (KRAS G13D)
IVVFAADVG

SEQ ID NO: 87980 - protein, 9 aa, synthetic construct
  source 1..9: note = Seed: VVVGAGDVG (KRAS G13D)
IVVFAADVH

SEQ ID NO: 87981 - protein, 9 aa, synthetic construct
  source 1..9: note = Seed: VVVGAGDVG (KRAS G13D)
IVVFAADVI

SEQ ID NO: 87982 - protein, 9 aa, synthetic construct
  source 1..9: note = Seed: VVVGAGDVG (KRAS G13D)
IVVFAADVL

SEQ ID NO: 87983 - protein, 9 aa, synthetic construct
  source 1..9: note = Seed: VVVGAGDVG (KRAS G13D)
IVVFAADVM

SEQ ID NO: 87984 - protein, 9 aa, synthetic construct
  source 1..9: note = Seed: VVVGAGDVG (KRAS G13D)
IVVFAADVN

SEQ ID NO: 87985 - protein, 9 aa, synthetic construct
  source 1..9: note = Seed: VVVGAGDVG (KRAS G13D)
IVVFAADVP

SEQ ID NO: 87986 - protein, 9 aa, synthetic construct
  source 1..9: note = Seed: VVVGAGDVG (KRAS G13D)
IVVFAADVQ

SEQ ID NO: 87987 - protein, 9 aa, synthetic construct
  source 1..9: note = Seed: VVVGAGDVG (KRAS G13D)
IVVFAADVS

SEQ ID NO: 87988 - protein, 9 aa, synthetic construct
  source 1..9: note = Seed: VVVGAGDVG (KRAS G13D)
IVVFAADVT

SEQ ID NO: 87989 - protein, 9 aa, synthetic construct
  source 1..9: note = Seed: VVVGAGDVG (KRAS G13D)
IVVFAADVV

SEQ ID NO: 87990 - protein, 9 aa, synthetic construct
  source 1..9: note = Seed: VVVGAGDVG (KRAS G13D)
IVVFAADVY

SEQ ID NO: 87991 - protein, 9 aa, synthetic construct
  source 1..9: note = Seed: VVVGAGDVG (KRAS G13D)
IVVFADDVA

SEQ ID NO: 87992 - protein, 9 aa, synthetic construct
  source 1..9: note = Seed: VVVGAGDVG (KRAS G13D)
IVVFADDVC

SEQ ID NO: 87993 - protein, 9 aa, synthetic construct
  source 1..9: note = Seed: VVVGAGDVG (KRAS G13D)
IVVFADDVD

SEQ ID NO: 87994 - protein, 9 aa, synthetic construct
  source 1..9: note = Seed: VVVGAGDVG (KRAS G13D)
IVVFADDVE

SEQ ID NO: 87995 - protein, 9 aa, synthetic construct
  source 1..9: note = Seed: VVVGAGDVG (KRAS G13D)
IVVFADDVF

SEQ ID NO: 87996 - protein, 9 aa, synthetic construct
  source 1..9: note = Seed: VVVGAGDVG (KRAS G13D)
IVVFADDVG

SEQ ID NO: 87997 - protein, 9 aa, synthetic construct
  source 1..9: note = Seed: VVVGAGDVG (KRAS G13D)
IVVFADDVH

SEQ ID NO: 87998 - protein, 9 aa, synthetic construct
  source 1..9: note = Seed: VVVGAGDVG (KRAS G13D)
IVVFADDVI

SEQ ID NO: 87999 - protein, 9 aa, synthetic construct
  source 1..9: note = Seed: VVVGAGDVG (KRAS G13D)
IVVFADDVK

SEQ ID NO: 88000 - protein, 9 aa, synthetic construct
  source 1..9: note = Seed: VVVGAGDVG (KRAS G13D)
IVVFADDVL

SEQ ID NO: 88001 - protein, 9 aa, synthetic construct
  source 1..9: note = Seed: VVVGAGDVG (KRAS G13D)
IVVFADDVM

SEQ ID NO: 88002 - protein, 9 aa, synthetic construct
  source 1..9: note = Seed: VVVGAGDVG (KRAS G13D)
IVVFADDVN

SEQ ID NO: 88003 - protein, 9 aa, synthetic construct
  source 1..9: note = Seed: VVVGAGDVG (KRAS G13D)
IVVFADDVP

SEQ ID NO: 88004 - protein, 9 aa, synthetic construct
  source 1..9: note = Seed: VVVGAGDVG (KRAS G13D)
IVVFADDVQ

SEQ ID NO: 88005 - protein, 9 aa, synthetic construct
  source 1..9: note = Seed: VVVGAGDVG (KRAS G13D)
IVVFADDVR

SEQ ID NO: 88006 - protein, 9 aa, synthetic construct
  source 1..9: note = Seed: VVVGAGDVG (KRAS G13D)
IVVFADDVS

SEQ ID NO: 88007 - protein, 9 aa, synthetic construct
  source 1..9: note = Seed: VVVGAGDVG (KRAS G13D)
IVVFADDVT

SEQ ID NO: 88008 - protein, 9 aa, synthetic construct
  source 1..9: note = Seed: VVVGAGDVG (KRAS G13D)
IVVFADDVV

SEQ ID NO: 88009 - protein, 9 aa, synthetic construct
  source 1..9: note = Seed: VVVGAGDVG (KRAS G13D)
IVVFADDVW

SEQ ID NO: 88010 - protein, 9 aa, synthetic construct
  source 1..9: note = Seed: VVVGAGDVG (KRAS G13D)
IVVFADDVY

SEQ ID NO: 88011 - protein, 9 aa, synthetic construct
  source 1..9: note = Seed: VVVGAGDVG (KRAS G13D)
IVVFAEDVA

SEQ ID NO: 88012 - protein, 9 aa, synthetic construct
  source 1..9: note = Seed: VVVGAGDVG (KRAS G13D)
IVVFAEDVI

SEQ ID NO: 88013 - protein, 9 aa, synthetic construct
  source 1..9: note = Seed: VVVGAGDVG (KRAS G13D)
IVVFAEDVV

SEQ ID NO: 88014 - protein, 9 aa, synthetic construct
  source 1..9: note = Seed: VVVGAGDVG (KRAS G13D)
IVVFAGDVA

SEQ ID NO: 88015 - protein, 9 aa, synthetic construct
  source 1..9: note = Seed: VVVGAGDVG (KRAS G13D)
IVVFAGDVM

SEQ ID NO: 88016 - protein, 9 aa, synthetic construct
  source 1..9: note = Seed: VVVGAGDVG (KRAS G13D)
IVVFAHDVA

SEQ ID NO: 88017 - protein, 9 aa, synthetic construct
  source 1..9: note = Seed: VVVGAGDVG (KRAS G13D)
IVVFAHDVG

SEQ ID NO: 88018 - protein, 9 aa, synthetic construct
  source 1..9: note = Seed: VVVGAGDVG (KRAS G13D)
IVVFAHDVI

SEQ ID NO: 88019 - protein, 9 aa, synthetic construct
  source 1..9: note = Seed: VVVGAGDVG (KRAS G13D)
IVVFAHDVL

SEQ ID NO: 88020 - protein, 9 aa, synthetic construct
  source 1..9: note = Seed: VVVGAGDVG (KRAS G13D)
IVVFAHDVM

SEQ ID NO: 88021 - protein, 9 aa, synthetic construct
  source 1..9: note = Seed: VVVGAGDVG (KRAS G13D)
IVVFAHDVS

SEQ ID NO: 88022 - protein, 9 aa, synthetic construct
  source 1..9: note = Seed: VVVGAGDVG (KRAS G13D)
IVVFAHDVV

SEQ ID NO: 88023 - protein, 9 aa, synthetic construct
  source 1..9: note = Seed: VVVGAGDVG (KRAS G13D)
IVVFAHDVY

SEQ ID NO: 88024 - protein, 9 aa, synthetic construct
  source 1..9: note = Seed: VVVGAGDVG (KRAS G13D)
IVVFAIDVA

SEQ ID NO: 88025 - protein, 9 aa, synthetic construct
  source 1..9: note = Seed: VVVGAGDVG (KRAS G13D)
IVVFAIDVH

SEQ ID NO: 88026 - protein, 9 aa, synthetic construct
  source 1..9: note = Seed: VVVGAGDVG (KRAS G13D)
IVVFAIDVQ

SEQ ID NO: 88027 - protein, 9 aa, synthetic construct
  source 1..9: note = Seed: VVVGAGDVG (KRAS G13D)
IVVFAIDVS

SEQ ID NO: 88028 - protein, 9 aa, synthetic construct
  source 1..9: note = Seed: VVVGAGDVG (KRAS G13D)
IVVFAIDVY

SEQ ID NO: 88029 - protein, 9 aa, synthetic construct
  source 1..9: note = Seed: VVVGAGDVG (KRAS G13D)
IVVFALDVA

SEQ ID NO: 88030 - protein, 9 aa, synthetic construct
  source 1..9: note = Seed: VVVGAGDVG (KRAS G13D)
IVVFALDVS

SEQ ID NO: 88031 - protein, 9 aa, synthetic construct
  source 1..9: note = Seed: VVVGAGDVG (KRAS G13D)
IVVFAMDVA

SEQ ID NO: 88032 - protein, 9 aa, synthetic construct
  source 1..9: note = Seed: VVVGAGDVG (KRAS G13D)
IVVFAMDVI

SEQ ID NO: 88033 - protein, 9 aa, synthetic construct
  source 1..9: note = Seed: VVVGAGDVG (KRAS G13D)
IVVFAMDVM

SEQ ID NO: 88034 - protein, 9 aa, synthetic construct
  source 1..9: note = Seed: VVVGAGDVG (KRAS G13D)
IVVFAMDVQ

SEQ ID NO: 88035 - protein, 9 aa, synthetic construct
  source 1..9: note = Seed: VVVGAGDVG (KRAS G13D)
IVVFAMDVV

SEQ ID NO: 88036 - protein, 9 aa, synthetic construct
  source 1..9: note = Seed: VVVGAGDVG (KRAS G13D)
IVVFAMDVY

SEQ ID NO: 88037 - protein, 9 aa, synthetic construct
  source 1..9: note = Seed: VVVGAGDVG (KRAS G13D)
IVVFANDVA

SEQ ID NO: 88038 - protein, 9 aa, synthetic construct
  source 1..9: note = Seed: VVVGAGDVG (KRAS G13D)
IVVFANDVC

SEQ ID NO: 88039 - protein, 9 aa, synthetic construct
  source 1..9: note = Seed: VVVGAGDVG (KRAS G13D)
IVVFANDVD

SEQ ID NO: 88040 - protein, 9 aa, synthetic construct
  source 1..9: note = Seed: VVVGAGDVG (KRAS G13D)
IVVFANDVE

SEQ ID NO: 88041 - protein, 9 aa, synthetic construct
  source 1..9: note = Seed: VVVGAGDVG (KRAS G13D)
IVVFANDVF

SEQ ID NO: 88042 - protein, 9 aa, synthetic construct
  source 1..9: note = Seed: VVVGAGDVG (KRAS G13D)
IVVFANDVG

SEQ ID NO: 88043 - protein, 9 aa, synthetic construct
  source 1..9: note = Seed: VVVGAGDVG (KRAS G13D)
IVVFANDVH

SEQ ID NO: 88044 - protein, 9 aa, synthetic construct
  source 1..9: note = Seed: VVVGAGDVG (KRAS G13D)
IVVFANDVI

SEQ ID NO: 88045 - protein, 9 aa, synthetic construct
  source 1..9: note = Seed: VVVGAGDVG (KRAS G13D)
IVVFANDVK

SEQ ID NO: 88046 - protein, 9 aa, synthetic construct
  source 1..9: note = Seed: VVVGAGDVG (KRAS G13D)
IVVFANDVL

SEQ ID NO: 88047 - protein, 9 aa, synthetic construct
  source 1..9: note = Seed: VVVGAGDVG (KRAS G13D)
IVVFANDVM

SEQ ID NO: 88048 - protein, 9 aa, synthetic construct
  source 1..9: note = Seed: VVVGAGDVG (KRAS G13D)
IVVFANDVN

SEQ ID NO: 88049 - protein, 9 aa, synthetic construct
  source 1..9: note = Seed: VVVGAGDVG (KRAS G13D)
IVVFANDVP

SEQ ID NO: 88050 - protein, 9 aa, synthetic construct
  source 1..9: note = Seed: VVVGAGDVG (KRAS G13D)
IVVFANDVQ

SEQ ID NO: 88051 - protein, 9 aa, synthetic construct
  source 1..9: note = Seed: VVVGAGDVG (KRAS G13D)
IVVFANDVR

SEQ ID NO: 88052 - protein, 9 aa, synthetic construct
  source 1..9: note = Seed: VVVGAGDVG (KRAS G13D)
IVVFANDVS

SEQ ID NO: 88053 - protein, 9 aa, synthetic construct
  source 1..9: note = Seed: VVVGAGDVG (KRAS G13D)
IVVFANDVT

SEQ ID NO: 88054 - protein, 9 aa, synthetic construct
  source 1..9: note = Seed: VVVGAGDVG (KRAS G13D)
IVVFANDVV

SEQ ID NO: 88055 - protein, 9 aa, synthetic construct
  source 1..9: note = Seed: VVVGAGDVG (KRAS G13D)
IVVFANDVW

SEQ ID NO: 88056 - protein, 9 aa, synthetic construct
  source 1..9: note = Seed: VVVGAGDVG (KRAS G13D)
IVVFANDVY

SEQ ID NO: 88057 - protein, 9 aa, synthetic construct
  source 1..9: note = Seed: VVVGAGDVG (KRAS G13D)
IVVFAPDVA

SEQ ID NO: 88058 - protein, 9 aa, synthetic construct
  source 1..9: note = Seed: VVVGAGDVG (KRAS G13D)
IVVFAPDVD

SEQ ID NO: 88059 - protein, 9 aa, synthetic construct
  source 1..9: note = Seed: VVVGAGDVG (KRAS G13D)
IVVFAPDVE

SEQ ID NO: 88060 - protein, 9 aa, synthetic construct
  source 1..9: note = Seed: VVVGAGDVG (KRAS G13D)
IVVFAPDVF

SEQ ID NO: 88061 - protein, 9 aa, synthetic construct
  source 1..9: note = Seed: VVVGAGDVG (KRAS G13D)
IVVFAPDVG

SEQ ID NO: 88062 - protein, 9 aa, synthetic construct
  source 1..9: note = Seed: VVVGAGDVG (KRAS G13D)
IVVFAPDVH

SEQ ID NO: 88063 - protein, 9 aa, synthetic construct
  source 1..9: note = Seed: VVVGAGDVG (KRAS G13D)
IVVFAPDVI

SEQ ID NO: 88064 - protein, 9 aa, synthetic construct
  source 1..9: note = Seed: VVVGAGDVG (KRAS G13D)
IVVFAPDVL

SEQ ID NO: 88065 - protein, 9 aa, synthetic construct
  source 1..9: note = Seed: VVVGAGDVG (KRAS G13D)
IVVFAPDVM

SEQ ID NO: 88066 - protein, 9 aa, synthetic construct
  source 1..9: note = Seed: VVVGAGDVG (KRAS G13D)
IVVFAPDVN

SEQ ID NO: 88067 - protein, 9 aa, synthetic construct
  source 1..9: note = Seed: VVVGAGDVG (KRAS G13D)
IVVFAPDVP

SEQ ID NO: 88068 - protein, 9 aa, synthetic construct
  source 1..9: note = Seed: VVVGAGDVG (KRAS G13D)
IVVFAPDVQ

SEQ ID NO: 88069 - protein, 9 aa, synthetic construct
  source 1..9: note = Seed: VVVGAGDVG (KRAS G13D)
IVVFAPDVR

SEQ ID NO: 88070 - protein, 9 aa, synthetic construct
  source 1..9: note = Seed: VVVGAGDVG (KRAS G13D)
IVVFAPDVS

SEQ ID NO: 88071 - protein, 9 aa, synthetic construct
  source 1..9: note = Seed: VVVGAGDVG (KRAS G13D)
IVVFAPDVT

SEQ ID NO: 88072 - protein, 9 aa, synthetic construct
  source 1..9: note = Seed: VVVGAGDVG (KRAS G13D)
IVVFAPDVV

SEQ ID NO: 88073 - protein, 9 aa, synthetic construct
  source 1..9: note = Seed: VVVGAGDVG (KRAS G13D)
IVVFAPDVW

SEQ ID NO: 88074 - protein, 9 aa, synthetic construct
  source 1..9: note = Seed: VVVGAGDVG (KRAS G13D)
IVVFAPDVY

SEQ ID NO: 88075 - protein, 9 aa, synthetic construct
  source 1..9: note = Seed: VVVGAGDVG (KRAS G13D)
IVVFAQDVA

SEQ ID NO: 88076 - protein, 9 aa, synthetic construct
  source 1..9: note = Seed: VVVGAGDVG (KRAS G13D)
IVVFAQDVV

SEQ ID NO: 88077 - protein, 9 aa, synthetic construct
  source 1..9: note = Seed: VVVGAGDVG (KRAS G13D)
IVVFARDVA

SEQ ID NO: 88078 - protein, 9 aa, synthetic construct
  source 1..9: note = Seed: VVVGAGDVG (KRAS G13D)
IVVFASDVA

SEQ ID NO: 88079 - protein, 9 aa, synthetic construct
  source 1..9: note = Seed: VVVGAGDVG (KRAS G13D)
IVVFASDVE

SEQ ID NO: 88080 - protein, 9 aa, synthetic construct
  source 1..9: note = Seed: VVVGAGDVG (KRAS G13D)
IVVFASDVF

SEQ ID NO: 88081 - protein, 9 aa, synthetic construct
  source 1..9: note = Seed: VVVGAGDVG (KRAS G13D)
IVVFASDVG

SEQ ID NO: 88082 - protein, 9 aa, synthetic construct
  source 1..9: note = Seed: VVVGAGDVG (KRAS G13D)
IVVFASDVH

SEQ ID NO: 88083 - protein, 9 aa, synthetic construct
  source 1..9: note = Seed: VVVGAGDVG (KRAS G13D)
IVVFASDVI

SEQ ID NO: 88084 - protein, 9 aa, synthetic construct
  source 1..9: note = Seed: VVVGAGDVG (KRAS G13D)
IVVFASDVL

SEQ ID NO: 88085 - protein, 9 aa, synthetic construct
  source 1..9: note = Seed: VVVGAGDVG (KRAS G13D)
IVVFASDVM

SEQ ID NO: 88086 - protein, 9 aa, synthetic construct
  source 1..9: note = Seed: VVVGAGDVG (KRAS G13D)
IVVFASDVN

SEQ ID NO: 88087 - protein, 9 aa, synthetic construct
  source 1..9: note = Seed: VVVGAGDVG (KRAS G13D)
IVVFASDVP

SEQ ID NO: 88088 - protein, 9 aa, synthetic construct
  source 1..9: note = Seed: VVVGAGDVG (KRAS G13D)
IVVFASDVQ

SEQ ID NO: 88089 - protein, 9 aa, synthetic construct
  source 1..9: note = Seed: VVVGAGDVG (KRAS G13D)
IVVFASDVR

SEQ ID NO: 88090 - protein, 9 aa, synthetic construct
  source 1..9: note = Seed: VVVGAGDVG (KRAS G13D)
IVVFASDVS

SEQ ID NO: 88091 - protein, 9 aa, synthetic construct
  source 1..9: note = Seed: VVVGAGDVG (KRAS G13D)
IVVFASDVT

SEQ ID NO: 88092 - protein, 9 aa, synthetic construct
  source 1..9: note = Seed: VVVGAGDVG (KRAS G13D)
IVVFASDVV

SEQ ID NO: 88093 - protein, 9 aa, synthetic construct
  source 1..9: note = Seed: VVVGAGDVG (KRAS G13D)
IVVFASDVY

SEQ ID NO: 88094 - protein, 9 aa, synthetic construct
  source 1..9: note = Seed: VVVGAGDVG (KRAS G13D)
IVVFATDVA

SEQ ID NO: 88095 - protein, 9 aa, synthetic construct
  source 1..9: note = Seed: VVVGAGDVG (KRAS G13D)
IVVFATDVG

SEQ ID NO: 88096 - protein, 9 aa, synthetic construct
  source 1..9: note = Seed: VVVGAGDVG (KRAS G13D)
IVVFATDVH

SEQ ID NO: 88097 - protein, 9 aa, synthetic construct
  source 1..9: note = Seed: VVVGAGDVG (KRAS G13D)
IVVFATDVI

SEQ ID NO: 88098 - protein, 9 aa, synthetic construct
  source 1..9: note = Seed: VVVGAGDVG (KRAS G13D)
IVVFATDVK

SEQ ID NO: 88099 - protein, 9 aa, synthetic construct
  source 1..9: note = Seed: VVVGAGDVG (KRAS G13D)
IVVFATDVL

SEQ ID NO: 88100 - protein, 9 aa, synthetic construct
  source 1..9: note = Seed: VVVGAGDVG (KRAS G13D)
IVVFATDVM

SEQ ID NO: 88101 - protein, 9 aa, synthetic construct
  source 1..9: note = Seed: VVVGAGDVG (KRAS G13D)
IVVFATDVN

SEQ ID NO: 88102 - protein, 9 aa, synthetic construct
  source 1..9: note = Seed: VVVGAGDVG (KRAS G13D)
IVVFATDVP

SEQ ID NO: 88103 - protein, 9 aa, synthetic construct
  source 1..9: note = Seed: VVVGAGDVG (KRAS G13D)
IVVFATDVQ

SEQ ID NO: 88104 - protein, 9 aa, synthetic construct
  source 1..9: note = Seed: VVVGAGDVG (KRAS G13D)
IVVFATDVR

SEQ ID NO: 88105 - protein, 9 aa, synthetic construct
  source 1..9: note = Seed: VVVGAGDVG (KRAS G13D)
IVVFATDVS

SEQ ID NO: 88106 - protein, 9 aa, synthetic construct
  source 1..9: note = Seed: VVVGAGDVG (KRAS G13D)
IVVFATDVT

SEQ ID NO: 88107 - protein, 9 aa, synthetic construct
  source 1..9: note = Seed: VVVGAGDVG (KRAS G13D)
IVVFATDVV

SEQ ID NO: 88108 - protein, 9 aa, synthetic construct
  source 1..9: note = Seed: VVVGAGDVG (KRAS G13D)
IVVFATDVY

SEQ ID NO: 88109 - protein, 9 aa, synthetic construct
  source 1..9: note = Seed: VVVGAGDVG (KRAS G13D)
IVVFAVDVA

SEQ ID NO: 88110 - protein, 9 aa, synthetic construct
  source 1..9: note = Seed: VVVGAGDVG (KRAS G13D)
IVVFAVDVH

SEQ ID NO: 88111 - protein, 9 aa, synthetic construct
  source 1..9: note = Seed: VVVGAGDVG (KRAS G13D)
IVVFAVDVN

SEQ ID NO: 88112 - protein, 9 aa, synthetic construct
  source 1..9: note = Seed: VVVGAGDVG (KRAS G13D)
IVVFAVDVS

SEQ ID NO: 88113 - protein, 9 aa, synthetic construct
  source 1..9: note = Seed: VVVGAGDVG (KRAS G13D)
IVVFAVDVY

SEQ ID NO: 88114 - protein, 9 aa, synthetic construct
  source 1..9: note = Seed: VVVGAGDVG (KRAS G13D)
IVVGAADVA

SEQ ID NO: 88115 - protein, 9 aa, synthetic construct
  source 1..9: note = Seed: VVVGAGDVG (KRAS G13D)
IVVGAADVD

SEQ ID NO: 88116 - protein, 9 aa, synthetic construct
  source 1..9: note = Seed: VVVGAGDVG (KRAS G13D)
IVVGAADVE

SEQ ID NO: 88117 - protein, 9 aa, synthetic construct
  source 1..9: note = Seed: VVVGAGDVG (KRAS G13D)
IVVGAADVG

SEQ ID NO: 88118 - protein, 9 aa, synthetic construct
  source 1..9: note = Seed: VVVGAGDVG (KRAS G13D)
IVVGAADVH

SEQ ID NO: 88119 - protein, 9 aa, synthetic construct
  source 1..9: note = Seed: VVVGAGDVG (KRAS G13D)
IVVGAADVI

SEQ ID NO: 88120 - protein, 9 aa, synthetic construct
  source 1..9: note = Seed: VVVGAGDVG (KRAS G13D)
IVVGAADVL

SEQ ID NO: 88121 - protein, 9 aa, synthetic construct
  source 1..9: note = Seed: VVVGAGDVG (KRAS G13D)
IVVGAADVM

SEQ ID NO: 88122 - protein, 9 aa, synthetic construct
  source 1..9: note = Seed: VVVGAGDVG (KRAS G13D)
IVVGAADVN

SEQ ID NO: 88123 - protein, 9 aa, synthetic construct
  source 1..9: note = Seed: VVVGAGDVG (KRAS G13D)
IVVGAADVQ

SEQ ID NO: 88124 - protein, 9 aa, synthetic construct
  source 1..9: note = Seed: VVVGAGDVG (KRAS G13D)
IVVGAADVS

SEQ ID NO: 88125 - protein, 9 aa, synthetic construct
  source 1..9: note = Seed: VVVGAGDVG (KRAS G13D)
IVVGAADVT

SEQ ID NO: 88126 - protein, 9 aa, synthetic construct
  source 1..9: note = Seed: VVVGAGDVG (KRAS G13D)
IVVGAADVV

SEQ ID NO: 88127 - protein, 9 aa, synthetic construct
  source 1..9: note = Seed: VVVGAGDVG (KRAS G13D)
IVVGADDVI

SEQ ID NO: 88128 - protein, 9 aa, synthetic construct
  source 1..9: note = Seed: VVVGAGDVG (KRAS G13D)
IVVGADDVL

SEQ ID NO: 88129 - protein, 9 aa, synthetic construct
  source 1..9: note = Seed: VVVGAGDVG (KRAS G13D)
IVVGAIDVA

SEQ ID NO: 88130 - protein, 9 aa, synthetic construct
  source 1..9: note = Seed: VVVGAGDVG (KRAS G13D)
IVVGAIDVI

SEQ ID NO: 88131 - protein, 9 aa, synthetic construct
  source 1..9: note = Seed: VVVGAGDVG (KRAS G13D)
IVVGAIDVL

SEQ ID NO: 88132 - protein, 9 aa, synthetic construct
  source 1..9: note = Seed: VVVGAGDVG (KRAS G13D)
IVVGAIDVM

SEQ ID NO: 88133 - protein, 9 aa, synthetic construct
  source 1..9: note = Seed: VVVGAGDVG (KRAS G13D)
IVVGAIDVN

SEQ ID NO: 88134 - protein, 9 aa, synthetic construct
  source 1..9: note = Seed: VVVGAGDVG (KRAS G13D)
IVVGAIDVS

SEQ ID NO: 88135 - protein, 9 aa, synthetic construct
  source 1..9: note = Seed: VVVGAGDVG (KRAS G13D)
IVVGAIDVY

SEQ ID NO: 88136 - protein, 9 aa, synthetic construct
  source 1..9: note = Seed: VVVGAGDVG (KRAS G13D)
IVVGALDVA

SEQ ID NO: 88137 - protein, 9 aa, synthetic construct
  source 1..9: note = Seed: VVVGAGDVG (KRAS G13D)
IVVGALDVY

SEQ ID NO: 88138 - protein, 9 aa, synthetic construct
  source 1..9: note = Seed: VVVGAGDVG (KRAS G13D)
IVVGAMDVA

SEQ ID NO: 88139 - protein, 9 aa, synthetic construct
  source 1..9: note = Seed: VVVGAGDVG (KRAS G13D)
IVVGAMDVI

SEQ ID NO: 88140 - protein, 9 aa, synthetic construct
  source 1..9: note = Seed: VVVGAGDVG (KRAS G13D)
IVVGAMDVL

SEQ ID NO: 88141 - protein, 9 aa, synthetic construct
  source 1..9: note = Seed: VVVGAGDVG (KRAS G13D)
IVVGAMDVM

SEQ ID NO: 88142 - protein, 9 aa, synthetic construct
  source 1..9: note = Seed: VVVGAGDVG (KRAS G13D)
IVVGAMDVV

SEQ ID NO: 88143 - protein, 9 aa, synthetic construct
  source 1..9: note = Seed: VVVGAGDVG (KRAS G13D)
IVVGANDVA

SEQ ID NO: 88144 - protein, 9 aa, synthetic construct
  source 1..9: note = Seed: VVVGAGDVG (KRAS G13D)
IVVGANDVC

SEQ ID NO: 88145 - protein, 9 aa, synthetic construct
  source 1..9: note = Seed: VVVGAGDVG (KRAS G13D)
IVVGANDVI

SEQ ID NO: 88146 - protein, 9 aa, synthetic construct
  source 1..9: note = Seed: VVVGAGDVG (KRAS G13D)
IVVGANDVL

SEQ ID NO: 88147 - protein, 9 aa, synthetic construct
  source 1..9: note = Seed: VVVGAGDVG (KRAS G13D)
IVVGANDVM

SEQ ID NO: 88148 - protein, 9 aa, synthetic construct
  source 1..9: note = Seed: VVVGAGDVG (KRAS G13D)
IVVGANDVN

SEQ ID NO: 88149 - protein, 9 aa, synthetic construct
  source 1..9: note = Seed: VVVGAGDVG (KRAS G13D)
IVVGANDVQ

SEQ ID NO: 88150 - protein, 9 aa, synthetic construct
  source 1..9: note = Seed: VVVGAGDVG (KRAS G13D)
IVVGANDVS

SEQ ID NO: 88151 - protein, 9 aa, synthetic construct
  source 1..9: note = Seed: VVVGAGDVG (KRAS G13D)
IVVGANDVV

SEQ ID NO: 88152 - protein, 9 aa, synthetic construct
  source 1..9: note = Seed: VVVGAGDVG (KRAS G13D)
IVVGAPDVA

SEQ ID NO: 88153 - protein, 9 aa, synthetic construct
  source 1..9: note = Seed: VVVGAGDVG (KRAS G13D)
IVVGASDVA

SEQ ID NO: 88154 - protein, 9 aa, synthetic construct
  source 1..9: note = Seed: VVVGAGDVG (KRAS G13D)
IVVGASDVI

SEQ ID NO: 88155 - protein, 9 aa, synthetic construct
  source 1..9: note = Seed: VVVGAGDVG (KRAS G13D)
IVVGASDVL

SEQ ID NO: 88156 - protein, 9 aa, synthetic construct
  source 1..9: note = Seed: VVVGAGDVG (KRAS G13D)
IVVGASDVM

SEQ ID NO: 88157 - protein, 9 aa, synthetic construct
  source 1..9: note = Seed: VVVGAGDVG (KRAS G13D)
IVVGASDVN

SEQ ID NO: 88158 - protein, 9 aa, synthetic construct
  source 1..9: note = Seed: VVVGAGDVG (KRAS G13D)
IVVGASDVQ

SEQ ID NO: 88159 - protein, 9 aa, synthetic construct
  source 1..9: note = Seed: VVVGAGDVG (KRAS G13D)
IVVGASDVS

SEQ ID NO: 88160 - protein, 9 aa, synthetic construct
  source 1..9: note = Seed: VVVGAGDVG (KRAS G13D)
IVVGASDVT

SEQ ID NO: 88161 - protein, 9 aa, synthetic construct
  source 1..9: note = Seed: VVVGAGDVG (KRAS G13D)
IVVGASDVV

SEQ ID NO: 88162 - protein, 9 aa, synthetic construct
  source 1..9: note = Seed: VVVGAGDVG (KRAS G13D)
IVVGATDVA

SEQ ID NO: 88163 - protein, 9 aa, synthetic construct
  source 1..9: note = Seed: VVVGAGDVG (KRAS G13D)
IVVGATDVS

SEQ ID NO: 88164 - protein, 9 aa, synthetic construct
  source 1..9: note = Seed: VVVGAGDVG (KRAS G13D)
IVVGAVDVA

SEQ ID NO: 88165 - protein, 9 aa, synthetic construct
  source 1..9: note = Seed: VVVGAGDVG (KRAS G13D)
IVVGAVDVS

SEQ ID NO: 88166 - protein, 9 aa, synthetic construct
  source 1..9: note = Seed: VVVGAGDVG (KRAS G13D)
IVVHAADVA

SEQ ID NO: 88167 - protein, 9 aa, synthetic construct
  source 1..9: note = Seed: VVVGAGDVG (KRAS G13D)
IVVHAADVC

SEQ ID NO: 88168 - protein, 9 aa, synthetic construct
  source 1..9: note = Seed: VVVGAGDVG (KRAS G13D)
IVVHAADVD

SEQ ID NO: 88169 - protein, 9 aa, synthetic construct
  source 1..9: note = Seed: VVVGAGDVG (KRAS G13D)
IVVHAADVF

SEQ ID NO: 88170 - protein, 9 aa, synthetic construct
  source 1..9: note = Seed: VVVGAGDVG (KRAS G13D)
IVVHAADVG

SEQ ID NO: 88171 - protein, 9 aa, synthetic construct
  source 1..9: note = Seed: VVVGAGDVG (KRAS G13D)
IVVHAADVI

SEQ ID NO: 88172 - protein, 9 aa, synthetic construct
  source 1..9: note = Seed: VVVGAGDVG (KRAS G13D)
IVVHAADVL

SEQ ID NO: 88173 - protein, 9 aa, synthetic construct
  source 1..9: note = Seed: VVVGAGDVG (KRAS G13D)
IVVHAADVM

SEQ ID NO: 88174 - protein, 9 aa, synthetic construct
  source 1..9: note = Seed: VVVGAGDVG (KRAS G13D)
IVVHAADVN

SEQ ID NO: 88175 - protein, 9 aa, synthetic construct
  source 1..9: note = Seed: VVVGAGDVG (KRAS G13D)
IVVHAADVQ

SEQ ID NO: 88176 - protein, 9 aa, synthetic construct
  source 1..9: note = Seed: VVVGAGDVG (KRAS G13D)
IVVHAADVS

SEQ ID NO: 88177 - protein, 9 aa, synthetic construct
  source 1..9: note = Seed: VVVGAGDVG (KRAS G13D)
IVVHAADVT

SEQ ID NO: 88178 - protein, 9 aa, synthetic construct
  source 1..9: note = Seed: VVVGAGDVG (KRAS G13D)
IVVHAADVV

SEQ ID NO: 88179 - protein, 9 aa, synthetic construct
  source 1..9: note = Seed: VVVGAGDVG (KRAS G13D)
IVVHAADVY

SEQ ID NO: 88180 - protein, 9 aa, synthetic construct
  source 1..9: note = Seed: VVVGAGDVG (KRAS G13D)
IVVHADDVA

SEQ ID NO: 88181 - protein, 9 aa, synthetic construct
  source 1..9: note = Seed: VVVGAGDVG (KRAS G13D)
IVVHADDVF

SEQ ID NO: 88182 - protein, 9 aa, synthetic construct
  source 1..9: note = Seed: VVVGAGDVG (KRAS G13D)
IVVHADDVI

SEQ ID NO: 88183 - protein, 9 aa, synthetic construct
  source 1..9: note = Seed: VVVGAGDVG (KRAS G13D)
IVVHADDVL

SEQ ID NO: 88184 - protein, 9 aa, synthetic construct
  source 1..9: note = Seed: VVVGAGDVG (KRAS G13D)
IVVHADDVM

SEQ ID NO: 88185 - protein, 9 aa, synthetic construct
  source 1..9: note = Seed: VVVGAGDVG (KRAS G13D)
IVVHADDVV

SEQ ID NO: 88186 - protein, 9 aa, synthetic construct
  source 1..9: note = Seed: VVVGAGDVG (KRAS G13D)
IVVHAGDVA

SEQ ID NO: 88187 - protein, 9 aa, synthetic construct
  source 1..9: note = Seed: VVVGAGDVG (KRAS G13D)
IVVHAIDVA

SEQ ID NO: 88188 - protein, 9 aa, synthetic construct
  source 1..9: note = Seed: VVVGAGDVG (KRAS G13D)
IVVHAIDVF

SEQ ID NO: 88189 - protein, 9 aa, synthetic construct
  source 1..9: note = Seed: VVVGAGDVG (KRAS G13D)
IVVHAIDVG

SEQ ID NO: 88190 - protein, 9 aa, synthetic construct
  source 1..9: note = Seed: VVVGAGDVG (KRAS G13D)
IVVHAIDVI

SEQ ID NO: 88191 - protein, 9 aa, synthetic construct
  source 1..9: note = Seed: VVVGAGDVG (KRAS G13D)
IVVHAIDVL

SEQ ID NO: 88192 - protein, 9 aa, synthetic construct
  source 1..9: note = Seed: VVVGAGDVG (KRAS G13D)
IVVHAIDVM

SEQ ID NO: 88193 - protein, 9 aa, synthetic construct
  source 1..9: note = Seed: VVVGAGDVG (KRAS G13D)
IVVHAIDVQ

SEQ ID NO: 88194 - protein, 9 aa, synthetic construct
  source 1..9: note = Seed: VVVGAGDVG (KRAS G13D)
IVVHAIDVS

SEQ ID NO: 88195 - protein, 9 aa, synthetic construct
  source 1..9: note = Seed: VVVGAGDVG (KRAS G13D)
IVVHAIDVV

SEQ ID NO: 88196 - protein, 9 aa, synthetic construct
  source 1..9: note = Seed: VVVGAGDVG (KRAS G13D)
IVVHAIDVY

SEQ ID NO: 88197 - protein, 9 aa, synthetic construct
  source 1..9: note = Seed: VVVGAGDVG (KRAS G13D)
IVVHALDVA

SEQ ID NO: 88198 - protein, 9 aa, synthetic construct
  source 1..9: note = Seed: VVVGAGDVG (KRAS G13D)
IVVHALDVF

SEQ ID NO: 88199 - protein, 9 aa, synthetic construct
  source 1..9: note = Seed: VVVGAGDVG (KRAS G13D)
IVVHALDVI

SEQ ID NO: 88200 - protein, 9 aa, synthetic construct
  source 1..9: note = Seed: VVVGAGDVG (KRAS G13D)
IVVHALDVL

SEQ ID NO: 88201 - protein, 9 aa, synthetic construct
  source 1..9: note = Seed: VVVGAGDVG (KRAS G13D)
IVVHALDVM

SEQ ID NO: 88202 - protein, 9 aa, synthetic construct
  source 1..9: note = Seed: VVVGAGDVG (KRAS G13D)
IVVHALDVQ

SEQ ID NO: 88203 - protein, 9 aa, synthetic construct
  source 1..9: note = Seed: VVVGAGDVG (KRAS G13D)
IVVHALDVV

SEQ ID NO: 88204 - protein, 9 aa, synthetic construct
  source 1..9: note = Seed: VVVGAGDVG (KRAS G13D)
IVVHALDVY

SEQ ID NO: 88205 - protein, 9 aa, synthetic construct
  source 1..9: note = Seed: VVVGAGDVG (KRAS G13D)
IVVHAMDVA

SEQ ID NO: 88206 - protein, 9 aa, synthetic construct
  source 1..9: note = Seed: VVVGAGDVG (KRAS G13D)
IVVHAMDVF

SEQ ID NO: 88207 - protein, 9 aa, synthetic construct
  source 1..9: note = Seed: VVVGAGDVG (KRAS G13D)
IVVHAMDVI

SEQ ID NO: 88208 - protein, 9 aa, synthetic construct
  source 1..9: note = Seed: VVVGAGDVG (KRAS G13D)
IVVHAMDVL

SEQ ID NO: 88209 - protein, 9 aa, synthetic construct
  source 1..9: note = Seed: VVVGAGDVG (KRAS G13D)
IVVHAMDVV

SEQ ID NO: 88210 - protein, 9 aa, synthetic construct
  source 1..9: note = Seed: VVVGAGDVG (KRAS G13D)
IVVHAMDVY

SEQ ID NO: 88211 - protein, 9 aa, synthetic construct
  source 1..9: note = Seed: VVVGAGDVG (KRAS G13D)
IVVHANDVA

SEQ ID NO: 88212 - protein, 9 aa, synthetic construct
  source 1..9: note = Seed: VVVGAGDVG (KRAS G13D)
IVVHANDVF

SEQ ID NO: 88213 - protein, 9 aa, synthetic construct
  source 1..9: note = Seed: VVVGAGDVG (KRAS G13D)
IVVHANDVG

SEQ ID NO: 88214 - protein, 9 aa, synthetic construct
  source 1..9: note = Seed: VVVGAGDVG (KRAS G13D)
IVVHANDVH

SEQ ID NO: 88215 - protein, 9 aa, synthetic construct
  source 1..9: note = Seed: VVVGAGDVG (KRAS G13D)
IVVHANDVI

SEQ ID NO: 88216 - protein, 9 aa, synthetic construct
  source 1..9: note = Seed: VVVGAGDVG (KRAS G13D)
IVVHANDVL

SEQ ID NO: 88217 - protein, 9 aa, synthetic construct
  source 1..9: note = Seed: VVVGAGDVG (KRAS G13D)
IVVHANDVM

SEQ ID NO: 88218 - protein, 9 aa, synthetic construct
  source 1..9: note = Seed: VVVGAGDVG (KRAS G13D)
IVVHANDVQ

SEQ ID NO: 88219 - protein, 9 aa, synthetic construct
  source 1..9: note = Seed: VVVGAGDVG (KRAS G13D)
IVVHANDVS

SEQ ID NO: 88220 - protein, 9 aa, synthetic construct
  source 1..9: note = Seed: VVVGAGDVG (KRAS G13D)
IVVHANDVT

SEQ ID NO: 88221 - protein, 9 aa, synthetic construct
  source 1..9: note = Seed: VVVGAGDVG (KRAS G13D)
IVVHANDVV

SEQ ID NO: 88222 - protein, 9 aa, synthetic construct
  source 1..9: note = Seed: VVVGAGDVG (KRAS G13D)
IVVHANDVY

SEQ ID NO: 88223 - protein, 9 aa, synthetic construct
  source 1..9: note = Seed: VVVGAGDVG (KRAS G13D)
IVVHAPDVA

SEQ ID NO: 88224 - protein, 9 aa, synthetic construct
  source 1..9: note = Seed: VVVGAGDVG (KRAS G13D)
IVVHAPDVN

SEQ ID NO: 88225 - protein, 9 aa, synthetic construct
  source 1..9: note = Seed: VVVGAGDVG (KRAS G13D)
IVVHAPDVS

SEQ ID NO: 88226 - protein, 9 aa, synthetic construct
  source 1..9: note = Seed: VVVGAGDVG (KRAS G13D)
IVVHAPDVV

SEQ ID NO: 88227 - protein, 9 aa, synthetic construct
  source 1..9: note = Seed: VVVGAGDVG (KRAS G13D)
IVVHASDVA

SEQ ID NO: 88228 - protein, 9 aa, synthetic construct
  source 1..9: note = Seed: VVVGAGDVG (KRAS G13D)
IVVHASDVF

SEQ ID NO: 88229 - protein, 9 aa, synthetic construct
  source 1..9: note = Seed: VVVGAGDVG (KRAS G13D)
IVVHASDVG

SEQ ID NO: 88230 - protein, 9 aa, synthetic construct
  source 1..9: note = Seed: VVVGAGDVG (KRAS G13D)
IVVHASDVI

SEQ ID NO: 88231 - protein, 9 aa, synthetic construct
  source 1..9: note = Seed: VVVGAGDVG (KRAS G13D)
IVVHASDVL

SEQ ID NO: 88232 - protein, 9 aa, synthetic construct
  source 1..9: note = Seed: VVVGAGDVG (KRAS G13D)
IVVHASDVM

SEQ ID NO: 88233 - protein, 9 aa, synthetic construct
  source 1..9: note = Seed: VVVGAGDVG (KRAS G13D)
IVVHASDVN

SEQ ID NO: 88234 - protein, 9 aa, synthetic construct
  source 1..9: note = Seed: VVVGAGDVG (KRAS G13D)
IVVHASDVS

SEQ ID NO: 88235 - protein, 9 aa, synthetic construct
  source 1..9: note = Seed: VVVGAGDVG (KRAS G13D)
IVVHASDVV

SEQ ID NO: 88236 - protein, 9 aa, synthetic construct
  source 1..9: note = Seed: VVVGAGDVG (KRAS G13D)
IVVHATDVA

SEQ ID NO: 88237 - protein, 9 aa, synthetic construct
  source 1..9: note = Seed: VVVGAGDVG (KRAS G13D)
IVVHATDVG

SEQ ID NO: 88238 - protein, 9 aa, synthetic construct
  source 1..9: note = Seed: VVVGAGDVG (KRAS G13D)
IVVHATDVH

SEQ ID NO: 88239 - protein, 9 aa, synthetic construct
  source 1..9: note = Seed: VVVGAGDVG (KRAS G13D)
IVVHATDVL

SEQ ID NO: 88240 - protein, 9 aa, synthetic construct
  source 1..9: note = Seed: VVVGAGDVG (KRAS G13D)
IVVHATDVM

SEQ ID NO: 88241 - protein, 9 aa, synthetic construct
  source 1..9: note = Seed: VVVGAGDVG (KRAS G13D)
IVVHATDVN

SEQ ID NO: 88242 - protein, 9 aa, synthetic construct
  source 1..9: note = Seed: VVVGAGDVG (KRAS G13D)
IVVHATDVQ

SEQ ID NO: 88243 - protein, 9 aa, synthetic construct
  source 1..9: note = Seed: VVVGAGDVG (KRAS G13D)
IVVHATDVS

SEQ ID NO: 88244 - protein, 9 aa, synthetic construct
  source 1..9: note = Seed: VVVGAGDVG (KRAS G13D)
IVVHATDVT

SEQ ID NO: 88245 - protein, 9 aa, synthetic construct
  source 1..9: note = Seed: VVVGAGDVG (KRAS G13D)
IVVHATDVV

SEQ ID NO: 88246 - protein, 9 aa, synthetic construct
  source 1..9: note = Seed: VVVGAGDVG (KRAS G13D)
IVVHAVDVA

SEQ ID NO: 88247 - protein, 9 aa, synthetic construct
  source 1..9: note = Seed: VVVGAGDVG (KRAS G13D)
IVVHAVDVF

SEQ ID NO: 88248 - protein, 9 aa, synthetic construct
  source 1..9: note = Seed: VVVGAGDVG (KRAS G13D)
IVVHAVDVG

SEQ ID NO: 88249 - protein, 9 aa, synthetic construct
  source 1..9: note = Seed: VVVGAGDVG (KRAS G13D)
IVVHAVDVI

SEQ ID NO: 88250 - protein, 9 aa, synthetic construct
  source 1..9: note = Seed: VVVGAGDVG (KRAS G13D)
IVVHAVDVL

SEQ ID NO: 88251 - protein, 9 aa, synthetic construct
  source 1..9: note = Seed: VVVGAGDVG (KRAS G13D)
IVVHAVDVM

SEQ ID NO: 88252 - protein, 9 aa, synthetic construct
  source 1..9: note = Seed: VVVGAGDVG (KRAS G13D)
IVVHAVDVN

SEQ ID NO: 88253 - protein, 9 aa, synthetic construct
  source 1..9: note = Seed: VVVGAGDVG (KRAS G13D)
IVVHAVDVQ

SEQ ID NO: 88254 - protein, 9 aa, synthetic construct
  source 1..9: note = Seed: VVVGAGDVG (KRAS G13D)
IVVHAVDVS

SEQ ID NO: 88255 - protein, 9 aa, synthetic construct
  source 1..9: note = Seed: VVVGAGDVG (KRAS G13D)
IVVHAVDVT

SEQ ID NO: 88256 - protein, 9 aa, synthetic construct
  source 1..9: note = Seed: VVVGAGDVG (KRAS G13D)
IVVHAVDVV

SEQ ID NO: 88257 - protein, 9 aa, synthetic construct
  source 1..9: note = Seed: VVVGAGDVG (KRAS G13D)
IVVHAVDVY

SEQ ID NO: 88258 - protein, 9 aa, synthetic construct
  source 1..9: note = Seed: VVVGAGDVG (KRAS G13D)
IVVIAADVA

SEQ ID NO: 88259 - protein, 9 aa, synthetic construct
  source 1..9: note = Seed: VVVGAGDVG (KRAS G13D)
IVVIAADVE

SEQ ID NO: 88260 - protein, 9 aa, synthetic construct
  source 1..9: note = Seed: VVVGAGDVG (KRAS G13D)
IVVIAADVG

SEQ ID NO: 88261 - protein, 9 aa, synthetic construct
  source 1..9: note = Seed: VVVGAGDVG (KRAS G13D)
IVVIAADVH

SEQ ID NO: 88262 - protein, 9 aa, synthetic construct
  source 1..9: note = Seed: VVVGAGDVG (KRAS G13D)
IVVIAADVI

SEQ ID NO: 88263 - protein, 9 aa, synthetic construct
  source 1..9: note = Seed: VVVGAGDVG (KRAS G13D)
IVVIAADVK

SEQ ID NO: 88264 - protein, 9 aa, synthetic construct
  source 1..9: note = Seed: VVVGAGDVG (KRAS G13D)
IVVIAADVL

SEQ ID NO: 88265 - protein, 9 aa, synthetic construct
  source 1..9: note = Seed: VVVGAGDVG (KRAS G13D)
IVVIAADVM

SEQ ID NO: 88266 - protein, 9 aa, synthetic construct
  source 1..9: note = Seed: VVVGAGDVG (KRAS G13D)
IVVIAADVN

SEQ ID NO: 88267 - protein, 9 aa, synthetic construct
  source 1..9: note = Seed: VVVGAGDVG (KRAS G13D)
IVVIAADVP

SEQ ID NO: 88268 - protein, 9 aa, synthetic construct
  source 1..9: note = Seed: VVVGAGDVG (KRAS G13D)
IVVIAADVQ

SEQ ID NO: 88269 - protein, 9 aa, synthetic construct
  source 1..9: note = Seed: VVVGAGDVG (KRAS G13D)
IVVIAADVR

SEQ ID NO: 88270 - protein, 9 aa, synthetic construct
  source 1..9: note = Seed: VVVGAGDVG (KRAS G13D)
IVVIAADVS

SEQ ID NO: 88271 - protein, 9 aa, synthetic construct
  source 1..9: note = Seed: VVVGAGDVG (KRAS G13D)
IVVIAADVT

SEQ ID NO: 88272 - protein, 9 aa, synthetic construct
  source 1..9: note = Seed: VVVGAGDVG (KRAS G13D)
IVVIAADVV

SEQ ID NO: 88273 - protein, 9 aa, synthetic construct
  source 1..9: note = Seed: VVVGAGDVG (KRAS G13D)
IVVIAADVY

SEQ ID NO: 88274 - protein, 9 aa, synthetic construct
  source 1..9: note = Seed: VVVGAGDVG (KRAS G13D)
IVVIADDVA

SEQ ID NO: 88275 - protein, 9 aa, synthetic construct
  source 1..9: note = Seed: VVVGAGDVG (KRAS G13D)
IVVIADDVG

SEQ ID NO: 88276 - protein, 9 aa, synthetic construct
  source 1..9: note = Seed: VVVGAGDVG (KRAS G13D)
IVVIADDVI

SEQ ID NO: 88277 - protein, 9 aa, synthetic construct
  source 1..9: note = Seed: VVVGAGDVG (KRAS G13D)
IVVIADDVL

SEQ ID NO: 88278 - protein, 9 aa, synthetic construct
  source 1..9: note = Seed: VVVGAGDVG (KRAS G13D)
IVVIADDVM

SEQ ID NO: 88279 - protein, 9 aa, synthetic construct
  source 1..9: note = Seed: VVVGAGDVG (KRAS G13D)
IVVIADDVS

SEQ ID NO: 88280 - protein, 9 aa, synthetic construct
  source 1..9: note = Seed: VVVGAGDVG (KRAS G13D)
IVVIADDVT

SEQ ID NO: 88281 - protein, 9 aa, synthetic construct
  source 1..9: note = Seed: VVVGAGDVG (KRAS G13D)
IVVIADDVV

SEQ ID NO: 88282 - protein, 9 aa, synthetic construct
  source 1..9: note = Seed: VVVGAGDVG (KRAS G13D)
IVVIAGDVA

SEQ ID NO: 88283 - protein, 9 aa, synthetic construct
  source 1..9: note = Seed: VVVGAGDVG (KRAS G13D)
IVVIAGDVN

SEQ ID NO: 88284 - protein, 9 aa, synthetic construct
  source 1..9: note = Seed: VVVGAGDVG (KRAS G13D)
IVVIAGDVS

SEQ ID NO: 88285 - protein, 9 aa, synthetic construct
  source 1..9: note = Seed: VVVGAGDVG (KRAS G13D)
IVVIAHDVA

SEQ ID NO: 88286 - protein, 9 aa, synthetic construct
  source 1..9: note = Seed: VVVGAGDVG (KRAS G13D)
IVVIAHDVN

SEQ ID NO: 88287 - protein, 9 aa, synthetic construct
  source 1..9: note = Seed: VVVGAGDVG (KRAS G13D)
IVVIAHDVQ

SEQ ID NO: 88288 - protein, 9 aa, synthetic construct
  source 1..9: note = Seed: VVVGAGDVG (KRAS G13D)
IVVIAHDVS

SEQ ID NO: 88289 - protein, 9 aa, synthetic construct
  source 1..9: note = Seed: VVVGAGDVG (KRAS G13D)
IVVIAIDVA

SEQ ID NO: 88290 - protein, 9 aa, synthetic construct
  source 1..9: note = Seed: VVVGAGDVG (KRAS G13D)
IVVIAIDVH

SEQ ID NO: 88291 - protein, 9 aa, synthetic construct
  source 1..9: note = Seed: VVVGAGDVG (KRAS G13D)
IVVIAIDVN

SEQ ID NO: 88292 - protein, 9 aa, synthetic construct
  source 1..9: note = Seed: VVVGAGDVG (KRAS G13D)
IVVIAIDVQ

SEQ ID NO: 88293 - protein, 9 aa, synthetic construct
  source 1..9: note = Seed: VVVGAGDVG (KRAS G13D)
IVVIAIDVS

SEQ ID NO: 88294 - protein, 9 aa, synthetic construct
  source 1..9: note = Seed: VVVGAGDVG (KRAS G13D)
IVVIANDVA

SEQ ID NO: 88295 - protein, 9 aa, synthetic construct
  source 1..9: note = Seed: VVVGAGDVG (KRAS G13D)
IVVIANDVD

SEQ ID NO: 88296 - protein, 9 aa, synthetic construct
  source 1..9: note = Seed: VVVGAGDVG (KRAS G13D)
IVVIANDVE

SEQ ID NO: 88297 - protein, 9 aa, synthetic construct
  source 1..9: note = Seed: VVVGAGDVG (KRAS G13D)
IVVIANDVF

SEQ ID NO: 88298 - protein, 9 aa, synthetic construct
  source 1..9: note = Seed: VVVGAGDVG (KRAS G13D)
IVVIANDVG

SEQ ID NO: 88299 - protein, 9 aa, synthetic construct
  source 1..9: note = Seed: VVVGAGDVG (KRAS G13D)
IVVIANDVH

SEQ ID NO: 88300 - protein, 9 aa, synthetic construct
  source 1..9: note = Seed: VVVGAGDVG (KRAS G13D)
IVVIANDVI

SEQ ID NO: 88301 - protein, 9 aa, synthetic construct
  source 1..9: note = Seed: VVVGAGDVG (KRAS G13D)
IVVIANDVK

SEQ ID NO: 88302 - protein, 9 aa, synthetic construct
  source 1..9: note = Seed: VVVGAGDVG (KRAS G13D)
IVVIANDVL

SEQ ID NO: 88303 - protein, 9 aa, synthetic construct
  source 1..9: note = Seed: VVVGAGDVG (KRAS G13D)
IVVIANDVM

SEQ ID NO: 88304 - protein, 9 aa, synthetic construct
  source 1..9: note = Seed: VVVGAGDVG (KRAS G13D)
IVVIANDVN

SEQ ID NO: 88305 - protein, 9 aa, synthetic construct
  source 1..9: note = Seed: VVVGAGDVG (KRAS G13D)
IVVIANDVP

SEQ ID NO: 88306 - protein, 9 aa, synthetic construct
  source 1..9: note = Seed: VVVGAGDVG (KRAS G13D)
IVVIANDVQ

SEQ ID NO: 88307 - protein, 9 aa, synthetic construct
  source 1..9: note = Seed: VVVGAGDVG (KRAS G13D)
IVVIANDVR

SEQ ID NO: 88308 - protein, 9 aa, synthetic construct
  source 1..9: note = Seed: VVVGAGDVG (KRAS G13D)
IVVIANDVS

SEQ ID NO: 88309 - protein, 9 aa, synthetic construct
  source 1..9: note = Seed: VVVGAGDVG (KRAS G13D)
IVVIANDVT

SEQ ID NO: 88310 - protein, 9 aa, synthetic construct
  source 1..9: note = Seed: VVVGAGDVG (KRAS G13D)
IVVIANDVV

SEQ ID NO: 88311 - protein, 9 aa, synthetic construct
  source 1..9: note = Seed: VVVGAGDVG (KRAS G13D)
IVVIANDVY

SEQ ID NO: 88312 - protein, 9 aa, synthetic construct
  source 1..9: note = Seed: VVVGAGDVG (KRAS G13D)
IVVIAPDVA

SEQ ID NO: 88313 - protein, 9 aa, synthetic construct
  source 1..9: note = Seed: VVVGAGDVG (KRAS G13D)
IVVIAPDVF

SEQ ID NO: 88314 - protein, 9 aa, synthetic construct
  source 1..9: note = Seed: VVVGAGDVG (KRAS G13D)
IVVIAPDVG

SEQ ID NO: 88315 - protein, 9 aa, synthetic construct
  source 1..9: note = Seed: VVVGAGDVG (KRAS G13D)
IVVIAPDVH

SEQ ID NO: 88316 - protein, 9 aa, synthetic construct
  source 1..9: note = Seed: VVVGAGDVG (KRAS G13D)
IVVIAPDVI

SEQ ID NO: 88317 - protein, 9 aa, synthetic construct
  source 1..9: note = Seed: VVVGAGDVG (KRAS G13D)
IVVIAPDVK

SEQ ID NO: 88318 - protein, 9 aa, synthetic construct
  source 1..9: note = Seed: VVVGAGDVG (KRAS G13D)
IVVIAPDVL

SEQ ID NO: 88319 - protein, 9 aa, synthetic construct
  source 1..9: note = Seed: VVVGAGDVG (KRAS G13D)
IVVIAPDVM

SEQ ID NO: 88320 - protein, 9 aa, synthetic construct
  source 1..9: note = Seed: VVVGAGDVG (KRAS G13D)
IVVIAPDVN

SEQ ID NO: 88321 - protein, 9 aa, synthetic construct
  source 1..9: note = Seed: VVVGAGDVG (KRAS G13D)
IVVIAPDVP

SEQ ID NO: 88322 - protein, 9 aa, synthetic construct
  source 1..9: note = Seed: VVVGAGDVG (KRAS G13D)
IVVIAPDVQ

SEQ ID NO: 88323 - protein, 9 aa, synthetic construct
  source 1..9: note = Seed: VVVGAGDVG (KRAS G13D)
IVVIAPDVR

SEQ ID NO: 88324 - protein, 9 aa, synthetic construct
  source 1..9: note = Seed: VVVGAGDVG (KRAS G13D)
IVVIAPDVS

SEQ ID NO: 88325 - protein, 9 aa, synthetic construct
  source 1..9: note = Seed: VVVGAGDVG (KRAS G13D)
IVVIAPDVT

SEQ ID NO: 88326 - protein, 9 aa, synthetic construct
  source 1..9: note = Seed: VVVGAGDVG (KRAS G13D)
IVVIAPDVV

SEQ ID NO: 88327 - protein, 9 aa, synthetic construct
  source 1..9: note = Seed: VVVGAGDVG (KRAS G13D)
IVVIAPDVY

SEQ ID NO: 88328 - protein, 9 aa, synthetic construct
  source 1..9: note = Seed: VVVGAGDVG (KRAS G13D)
IVVIASDVA

SEQ ID NO: 88329 - protein, 9 aa, synthetic construct
  source 1..9: note = Seed: VVVGAGDVG (KRAS G13D)
IVVIASDVG

SEQ ID NO: 88330 - protein, 9 aa, synthetic construct
  source 1..9: note = Seed: VVVGAGDVG (KRAS G13D)
IVVIASDVH

SEQ ID NO: 88331 - protein, 9 aa, synthetic construct
  source 1..9: note = Seed: VVVGAGDVG (KRAS G13D)
IVVIASDVI

SEQ ID NO: 88332 - protein, 9 aa, synthetic construct
  source 1..9: note = Seed: VVVGAGDVG (KRAS G13D)
IVVIASDVK

SEQ ID NO: 88333 - protein, 9 aa, synthetic construct
  source 1..9: note = Seed: VVVGAGDVG (KRAS G13D)
IVVIASDVL

SEQ ID NO: 88334 - protein, 9 aa, synthetic construct
  source 1..9: note = Seed: VVVGAGDVG (KRAS G13D)
IVVIASDVM

SEQ ID NO: 88335 - protein, 9 aa, synthetic construct
  source 1..9: note = Seed: VVVGAGDVG (KRAS G13D)
IVVIASDVN

SEQ ID NO: 88336 - protein, 9 aa, synthetic construct
  source 1..9: note = Seed: VVVGAGDVG (KRAS G13D)
IVVIASDVP

SEQ ID NO: 88337 - protein, 9 aa, synthetic construct
  source 1..9: note = Seed: VVVGAGDVG (KRAS G13D)
IVVIASDVQ

SEQ ID NO: 88338 - protein, 9 aa, synthetic construct
  source 1..9: note = Seed: VVVGAGDVG (KRAS G13D)
IVVIASDVR

SEQ ID NO: 88339 - protein, 9 aa, synthetic construct
  source 1..9: note = Seed: VVVGAGDVG (KRAS G13D)
IVVIASDVS

SEQ ID NO: 88340 - protein, 9 aa, synthetic construct
  source 1..9: note = Seed: VVVGAGDVG (KRAS G13D)
IVVIASDVT

SEQ ID NO: 88341 - protein, 9 aa, synthetic construct
  source 1..9: note = Seed: VVVGAGDVG (KRAS G13D)
IVVIASDVV

SEQ ID NO: 88342 - protein, 9 aa, synthetic construct
  source 1..9: note = Seed: VVVGAGDVG (KRAS G13D)
IVVIASDVY

SEQ ID NO: 88343 - protein, 9 aa, synthetic construct
  source 1..9: note = Seed: VVVGAGDVG (KRAS G13D)
IVVIATDVA

SEQ ID NO: 88344 - protein, 9 aa, synthetic construct
  source 1..9: note = Seed: VVVGAGDVG (KRAS G13D)
IVVIATDVG

SEQ ID NO: 88345 - protein, 9 aa, synthetic construct
  source 1..9: note = Seed: VVVGAGDVG (KRAS G13D)
IVVIATDVH

SEQ ID NO: 88346 - protein, 9 aa, synthetic construct
  source 1..9: note = Seed: VVVGAGDVG (KRAS G13D)
IVVIATDVI

SEQ ID NO: 88347 - protein, 9 aa, synthetic construct
  source 1..9: note = Seed: VVVGAGDVG (KRAS G13D)
IVVIATDVK

SEQ ID NO: 88348 - protein, 9 aa, synthetic construct
  source 1..9: note = Seed: VVVGAGDVG (KRAS G13D)
IVVIATDVL

SEQ ID NO: 88349 - protein, 9 aa, synthetic construct
  source 1..9: note = Seed: VVVGAGDVG (KRAS G13D)
IVVIATDVM

SEQ ID NO: 88350 - protein, 9 aa, synthetic construct
  source 1..9: note = Seed: VVVGAGDVG (KRAS G13D)
IVVIATDVN

SEQ ID NO: 88351 - protein, 9 aa, synthetic construct
  source 1..9: note = Seed: VVVGAGDVG (KRAS G13D)
IVVIATDVP

SEQ ID NO: 88352 - protein, 9 aa, synthetic construct
  source 1..9: note = Seed: VVVGAGDVG (KRAS G13D)
IVVIATDVQ

SEQ ID NO: 88353 - protein, 9 aa, synthetic construct
  source 1..9: note = Seed: VVVGAGDVG (KRAS G13D)
IVVIATDVR

SEQ ID NO: 88354 - protein, 9 aa, synthetic construct
  source 1..9: note = Seed: VVVGAGDVG (KRAS G13D)
IVVIATDVS

SEQ ID NO: 88355 - protein, 9 aa, synthetic construct
  source 1..9: note = Seed: VVVGAGDVG (KRAS G13D)
IVVIATDVT

SEQ ID NO: 88356 - protein, 9 aa, synthetic construct
  source 1..9: note = Seed: VVVGAGDVG (KRAS G13D)
IVVIATDVV

SEQ ID NO: 88357 - protein, 9 aa, synthetic construct
  source 1..9: note = Seed: VVVGAGDVG (KRAS G13D)
IVVIAVDVA

SEQ ID NO: 88358 - protein, 9 aa, synthetic construct
  source 1..9: note = Seed: VVVGAGDVG (KRAS G13D)
IVVIAVDVH

SEQ ID NO: 88359 - protein, 9 aa, synthetic construct
  source 1..9: note = Seed: VVVGAGDVG (KRAS G13D)
IVVIAVDVN

SEQ ID NO: 88360 - protein, 9 aa, synthetic construct
  source 1..9: note = Seed: VVVGAGDVG (KRAS G13D)
IVVIAVDVQ

SEQ ID NO: 88361 - protein, 9 aa, synthetic construct
  source 1..9: note = Seed: VVVGAGDVG (KRAS G13D)
IVVIAVDVS

SEQ ID NO: 88362 - protein, 9 aa, synthetic construct
  source 1..9: note = Seed: VVVGAGDVG (KRAS G13D)
IVVKAADVC

SEQ ID NO: 88363 - protein, 9 aa, synthetic construct
  source 1..9: note = Seed: VVVGAGDVG (KRAS G13D)
IVVKAADVG

SEQ ID NO: 88364 - protein, 9 aa, synthetic construct
  source 1..9: note = Seed: VVVGAGDVG (KRAS G13D)
IVVKAADVL

SEQ ID NO: 88365 - protein, 9 aa, synthetic construct
  source 1..9: note = Seed: VVVGAGDVG (KRAS G13D)
IVVKAADVN

SEQ ID NO: 88366 - protein, 9 aa, synthetic construct
  source 1..9: note = Seed: VVVGAGDVG (KRAS G13D)
IVVKAADVS

SEQ ID NO: 88367 - protein, 9 aa, synthetic construct
  source 1..9: note = Seed: VVVGAGDVG (KRAS G13D)
IVVKAADVV

SEQ ID NO: 88368 - protein, 9 aa, synthetic construct
  source 1..9: note = Seed: VVVGAGDVG (KRAS G13D)
IVVKANDVA

SEQ ID NO: 88369 - protein, 9 aa, synthetic construct
  source 1..9: note = Seed: VVVGAGDVG (KRAS G13D)
IVVKANDVS

SEQ ID NO: 88370 - protein, 9 aa, synthetic construct
  source 1..9: note = Seed: VVVGAGDVG (KRAS G13D)
IVVKAPDVA

SEQ ID NO: 88371 - protein, 9 aa, synthetic construct
  source 1..9: note = Seed: VVVGAGDVG (KRAS G13D)
IVVKAPDVS

SEQ ID NO: 88372 - protein, 9 aa, synthetic construct
  source 1..9: note = Seed: VVVGAGDVG (KRAS G13D)
IVVKASDVA

SEQ ID NO: 88373 - protein, 9 aa, synthetic construct
  source 1..9: note = Seed: VVVGAGDVG (KRAS G13D)
IVVKASDVC

SEQ ID NO: 88374 - protein, 9 aa, synthetic construct
  source 1..9: note = Seed: VVVGAGDVG (KRAS G13D)
IVVKATDVA

SEQ ID NO: 88375 - protein, 9 aa, synthetic construct
  source 1..9: note = Seed: VVVGAGDVG (KRAS G13D)
IVVKATDVG

SEQ ID NO: 88376 - protein, 9 aa, synthetic construct
  source 1..9: note = Seed: VVVGAGDVG (KRAS G13D)
IVVKATDVN

SEQ ID NO: 88377 - protein, 9 aa, synthetic construct
  source 1..9: note = Seed: VVVGAGDVG (KRAS G13D)
IVVKATDVS

SEQ ID NO: 88378 - protein, 9 aa, synthetic construct
  source 1..9: note = Seed: VVVGAGDVG (KRAS G13D)
IVVKAVDVG

SEQ ID NO: 88379 - protein, 9 aa, synthetic construct
  source 1..9: note = Seed: VVVGAGDVG (KRAS G13D)
IVVKAVDVS

SEQ ID NO: 88380 - protein, 9 aa, synthetic construct
  source 1..9: note = Seed: VVVGAGDVG (KRAS G13D)
IVVLAADVA

SEQ ID NO: 88381 - protein, 9 aa, synthetic construct
  source 1..9: note = Seed: VVVGAGDVG (KRAS G13D)
IVVLAADVD

SEQ ID NO: 88382 - protein, 9 aa, synthetic construct
  source 1..9: note = Seed: VVVGAGDVG (KRAS G13D)
IVVLAADVE

SEQ ID NO: 88383 - protein, 9 aa, synthetic construct
  source 1..9: note = Seed: VVVGAGDVG (KRAS G13D)
IVVLAADVF

SEQ ID NO: 88384 - protein, 9 aa, synthetic construct
  source 1..9: note = Seed: VVVGAGDVG (KRAS G13D)
IVVLAADVG

SEQ ID NO: 88385 - protein, 9 aa, synthetic construct
  source 1..9: note = Seed: VVVGAGDVG (KRAS G13D)
IVVLAADVH

SEQ ID NO: 88386 - protein, 9 aa, synthetic construct
  source 1..9: note = Seed: VVVGAGDVG (KRAS G13D)
IVVLAADVI

SEQ ID NO: 88387 - protein, 9 aa, synthetic construct
  source 1..9: note = Seed: VVVGAGDVG (KRAS G13D)
IVVLAADVK

SEQ ID NO: 88388 - protein, 9 aa, synthetic construct
  source 1..9: note = Seed: VVVGAGDVG (KRAS G13D)
IVVLAADVL

SEQ ID NO: 88389 - protein, 9 aa, synthetic construct
  source 1..9: note = Seed: VVVGAGDVG (KRAS G13D)
IVVLAADVM

SEQ ID NO: 88390 - protein, 9 aa, synthetic construct
  source 1..9: note = Seed: VVVGAGDVG (KRAS G13D)
IVVLAADVN

SEQ ID NO: 88391 - protein, 9 aa, synthetic construct
  source 1..9: note = Seed: VVVGAGDVG (KRAS G13D)
IVVLAADVP

SEQ ID NO: 88392 - protein, 9 aa, synthetic construct
  source 1..9: note = Seed: VVVGAGDVG (KRAS G13D)
IVVLAADVQ

SEQ ID NO: 88393 - protein, 9 aa, synthetic construct
  source 1..9: note = Seed: VVVGAGDVG (KRAS G13D)
IVVLAADVR

SEQ ID NO: 88394 - protein, 9 aa, synthetic construct
  source 1..9: note = Seed: VVVGAGDVG (KRAS G13D)
IVVLAADVS

SEQ ID NO: 88395 - protein, 9 aa, synthetic construct
  source 1..9: note = Seed: VVVGAGDVG (KRAS G13D)
IVVLAADVT

SEQ ID NO: 88396 - protein, 9 aa, synthetic construct
  source 1..9: note = Seed: VVVGAGDVG (KRAS G13D)
IVVLAADVV

SEQ ID NO: 88397 - protein, 9 aa, synthetic construct
  source 1..9: note = Seed: VVVGAGDVG (KRAS G13D)
IVVLAADVY

SEQ ID NO: 88398 - protein, 9 aa, synthetic construct
  source 1..9: note = Seed: VVVGAGDVG (KRAS G13D)
IVVLADDVA

SEQ ID NO: 88399 - protein, 9 aa, synthetic construct
  source 1..9: note = Seed: VVVGAGDVG (KRAS G13D)
IVVLADDVG

SEQ ID NO: 88400 - protein, 9 aa, synthetic construct
  source 1..9: note = Seed: VVVGAGDVG (KRAS G13D)
IVVLADDVI

SEQ ID NO: 88401 - protein, 9 aa, synthetic construct
  source 1..9: note = Seed: VVVGAGDVG (KRAS G13D)
IVVLADDVL

SEQ ID NO: 88402 - protein, 9 aa, synthetic construct
  source 1..9: note = Seed: VVVGAGDVG (KRAS G13D)
IVVLADDVM

SEQ ID NO: 88403 - protein, 9 aa, synthetic construct
  source 1..9: note = Seed: VVVGAGDVG (KRAS G13D)
IVVLADDVS

SEQ ID NO: 88404 - protein, 9 aa, synthetic construct
  source 1..9: note = Seed: VVVGAGDVG (KRAS G13D)
IVVLADDVT

SEQ ID NO: 88405 - protein, 9 aa, synthetic construct
  source 1..9: note = Seed: VVVGAGDVG (KRAS G13D)
IVVLADDVV

SEQ ID NO: 88406 - protein, 9 aa, synthetic construct
  source 1..9: note = Seed: VVVGAGDVG (KRAS G13D)
IVVLAEDVA

SEQ ID NO: 88407 - protein, 9 aa, synthetic construct
  source 1..9: note = Seed: VVVGAGDVG (KRAS G13D)
IVVLAGDVA

SEQ ID NO: 88408 - protein, 9 aa, synthetic construct
  source 1..9: note = Seed: VVVGAGDVG (KRAS G13D)
IVVLAGDVH

SEQ ID NO: 88409 - protein, 9 aa, synthetic construct
  source 1..9: note = Seed: VVVGAGDVG (KRAS G13D)
IVVLAGDVL

SEQ ID NO: 88410 - protein, 9 aa, synthetic construct
  source 1..9: note = Seed: VVVGAGDVG (KRAS G13D)
IVVLAGDVM

SEQ ID NO: 88411 - protein, 9 aa, synthetic construct
  source 1..9: note = Seed: VVVGAGDVG (KRAS G13D)
IVVLAGDVN

SEQ ID NO: 88412 - protein, 9 aa, synthetic construct
  source 1..9: note = Seed: VVVGAGDVG (KRAS G13D)
IVVLAGDVP

SEQ ID NO: 88413 - protein, 9 aa, synthetic construct
  source 1..9: note = Seed: VVVGAGDVG (KRAS G13D)
IVVLAGDVQ

SEQ ID NO: 88414 - protein, 9 aa, synthetic construct
  source 1..9: note = Seed: VVVGAGDVG (KRAS G13D)
IVVLAGDVS

SEQ ID NO: 88415 - protein, 9 aa, synthetic construct
  source 1..9: note = Seed: VVVGAGDVG (KRAS G13D)
IVVLAGDVT

SEQ ID NO: 88416 - protein, 9 aa, synthetic construct
  source 1..9: note = Seed: VVVGAGDVG (KRAS G13D)
IVVLAGDVV

SEQ ID NO: 88417 - protein, 9 aa, synthetic construct
  source 1..9: note = Seed: VVVGAGDVG (KRAS G13D)
IVVLAHDVA

SEQ ID NO: 88418 - protein, 9 aa, synthetic construct
  source 1..9: note = Seed: VVVGAGDVG (KRAS G13D)
IVVLAHDVD

SEQ ID NO: 88419 - protein, 9 aa, synthetic construct
  source 1..9: note = Seed: VVVGAGDVG (KRAS G13D)
IVVLAHDVE

SEQ ID NO: 88420 - protein, 9 aa, synthetic construct
  source 1..9: note = Seed: VVVGAGDVG (KRAS G13D)
IVVLAHDVG

SEQ ID NO: 88421 - protein, 9 aa, synthetic construct
  source 1..9: note = Seed: VVVGAGDVG (KRAS G13D)
IVVLAHDVH

SEQ ID NO: 88422 - protein, 9 aa, synthetic construct
  source 1..9: note = Seed: VVVGAGDVG (KRAS G13D)
IVVLAHDVI

SEQ ID NO: 88423 - protein, 9 aa, synthetic construct
  source 1..9: note = Seed: VVVGAGDVG (KRAS G13D)
IVVLAHDVL

SEQ ID NO: 88424 - protein, 9 aa, synthetic construct
  source 1..9: note = Seed: VVVGAGDVG (KRAS G13D)
IVVLAHDVM

SEQ ID NO: 88425 - protein, 9 aa, synthetic construct
  source 1..9: note = Seed: VVVGAGDVG (KRAS G13D)
IVVLAHDVN

SEQ ID NO: 88426 - protein, 9 aa, synthetic construct
  source 1..9: note = Seed: VVVGAGDVG (KRAS G13D)
IVVLAHDVQ

SEQ ID NO: 88427 - protein, 9 aa, synthetic construct
  source 1..9: note = Seed: VVVGAGDVG (KRAS G13D)
IVVLAHDVS

SEQ ID NO: 88428 - protein, 9 aa, synthetic construct
  source 1..9: note = Seed: VVVGAGDVG (KRAS G13D)
IVVLAHDVT

SEQ ID NO: 88429 - protein, 9 aa, synthetic construct
  source 1..9: note = Seed: VVVGAGDVG (KRAS G13D)
IVVLAHDVV

SEQ ID NO: 88430 - protein, 9 aa, synthetic construct
  source 1..9: note = Seed: VVVGAGDVG (KRAS G13D)
IVVLAIDVA

SEQ ID NO: 88431 - protein, 9 aa, synthetic construct
  source 1..9: note = Seed: VVVGAGDVG (KRAS G13D)
IVVLAIDVE

SEQ ID NO: 88432 - protein, 9 aa, synthetic construct
  source 1..9: note = Seed: VVVGAGDVG (KRAS G13D)
IVVLAIDVH

SEQ ID NO: 88433 - protein, 9 aa, synthetic construct
  source 1..9: note = Seed: VVVGAGDVG (KRAS G13D)
IVVLAIDVM

SEQ ID NO: 88434 - protein, 9 aa, synthetic construct
  source 1..9: note = Seed: VVVGAGDVG (KRAS G13D)
IVVLAIDVN

SEQ ID NO: 88435 - protein, 9 aa, synthetic construct
  source 1..9: note = Seed: VVVGAGDVG (KRAS G13D)
IVVLAIDVQ

SEQ ID NO: 88436 - protein, 9 aa, synthetic construct
  source 1..9: note = Seed: VVVGAGDVG (KRAS G13D)
IVVLAIDVR

SEQ ID NO: 88437 - protein, 9 aa, synthetic construct
  source 1..9: note = Seed: VVVGAGDVG (KRAS G13D)
IVVLAIDVS

SEQ ID NO: 88438 - protein, 9 aa, synthetic construct
  source 1..9: note = Seed: VVVGAGDVG (KRAS G13D)
IVVLAIDVT

SEQ ID NO: 88439 - protein, 9 aa, synthetic construct
  source 1..9: note = Seed: VVVGAGDVG (KRAS G13D)
IVVLAIDVY

SEQ ID NO: 88440 - protein, 9 aa, synthetic construct
  source 1..9: note = Seed: VVVGAGDVG (KRAS G13D)
IVVLALDVS

SEQ ID NO: 88441 - protein, 9 aa, synthetic construct
  source 1..9: note = Seed: VVVGAGDVG (KRAS G13D)
IVVLAMDVG

SEQ ID NO: 88442 - protein, 9 aa, synthetic construct
  source 1..9: note = Seed: VVVGAGDVG (KRAS G13D)
IVVLAMDVM

SEQ ID NO: 88443 - protein, 9 aa, synthetic construct
  source 1..9: note = Seed: VVVGAGDVG (KRAS G13D)
IVVLAMDVV

SEQ ID NO: 88444 - protein, 9 aa, synthetic construct
  source 1..9: note = Seed: VVVGAGDVG (KRAS G13D)
IVVLAMDVY

SEQ ID NO: 88445 - protein, 9 aa, synthetic construct
  source 1..9: note = Seed: VVVGAGDVG (KRAS G13D)
IVVLANDVA

SEQ ID NO: 88446 - protein, 9 aa, synthetic construct
  source 1..9: note = Seed: VVVGAGDVG (KRAS G13D)
IVVLANDVD

SEQ ID NO: 88447 - protein, 9 aa, synthetic construct
  source 1..9: note = Seed: VVVGAGDVG (KRAS G13D)
IVVLANDVE

SEQ ID NO: 88448 - protein, 9 aa, synthetic construct
  source 1..9: note = Seed: VVVGAGDVG (KRAS G13D)
IVVLANDVF

SEQ ID NO: 88449 - protein, 9 aa, synthetic construct
  source 1..9: note = Seed: VVVGAGDVG (KRAS G13D)
IVVLANDVG

SEQ ID NO: 88450 - protein, 9 aa, synthetic construct
  source 1..9: note = Seed: VVVGAGDVG (KRAS G13D)
IVVLANDVH

SEQ ID NO: 88451 - protein, 9 aa, synthetic construct
  source 1..9: note = Seed: VVVGAGDVG (KRAS G13D)
IVVLANDVI

SEQ ID NO: 88452 - protein, 9 aa, synthetic construct
  source 1..9: note = Seed: VVVGAGDVG (KRAS G13D)
IVVLANDVK

SEQ ID NO: 88453 - protein, 9 aa, synthetic construct
  source 1..9: note = Seed: VVVGAGDVG (KRAS G13D)
IVVLANDVL

SEQ ID NO: 88454 - protein, 9 aa, synthetic construct
  source 1..9: note = Seed: VVVGAGDVG (KRAS G13D)
IVVLANDVM

SEQ ID NO: 88455 - protein, 9 aa, synthetic construct
  source 1..9: note = Seed: VVVGAGDVG (KRAS G13D)
IVVLANDVN

SEQ ID NO: 88456 - protein, 9 aa, synthetic construct
  source 1..9: note = Seed: VVVGAGDVG (KRAS G13D)
IVVLANDVP

SEQ ID NO: 88457 - protein, 9 aa, synthetic construct
  source 1..9: note = Seed: VVVGAGDVG (KRAS G13D)
IVVLANDVQ

SEQ ID NO: 88458 - protein, 9 aa, synthetic construct
  source 1..9: note = Seed: VVVGAGDVG (KRAS G13D)
IVVLANDVR

SEQ ID NO: 88459 - protein, 9 aa, synthetic construct
  source 1..9: note = Seed: VVVGAGDVG (KRAS G13D)
IVVLANDVS

SEQ ID NO: 88460 - protein, 9 aa, synthetic construct
  source 1..9: note = Seed: VVVGAGDVG (KRAS G13D)
IVVLANDVT

SEQ ID NO: 88461 - protein, 9 aa, synthetic construct
  source 1..9: note = Seed: VVVGAGDVG (KRAS G13D)
IVVLANDVV

SEQ ID NO: 88462 - protein, 9 aa, synthetic construct
  source 1..9: note = Seed: VVVGAGDVG (KRAS G13D)
IVVLANDVY

SEQ ID NO: 88463 - protein, 9 aa, synthetic construct
  source 1..9: note = Seed: VVVGAGDVG (KRAS G13D)
IVVLAPDVA

SEQ ID NO: 88464 - protein, 9 aa, synthetic construct
  source 1..9: note = Seed: VVVGAGDVG (KRAS G13D)
IVVLAPDVD

SEQ ID NO: 88465 - protein, 9 aa, synthetic construct
  source 1..9: note = Seed: VVVGAGDVG (KRAS G13D)
IVVLAPDVE

SEQ ID NO: 88466 - protein, 9 aa, synthetic construct
  source 1..9: note = Seed: VVVGAGDVG (KRAS G13D)
IVVLAPDVF

SEQ ID NO: 88467 - protein, 9 aa, synthetic construct
  source 1..9: note = Seed: VVVGAGDVG (KRAS G13D)
IVVLAPDVG

SEQ ID NO: 88468 - protein, 9 aa, synthetic construct
  source 1..9: note = Seed: VVVGAGDVG (KRAS G13D)
IVVLAPDVH

SEQ ID NO: 88469 - protein, 9 aa, synthetic construct
  source 1..9: note = Seed: VVVGAGDVG (KRAS G13D)
IVVLAPDVI

SEQ ID NO: 88470 - protein, 9 aa, synthetic construct
  source 1..9: note = Seed: VVVGAGDVG (KRAS G13D)
IVVLAPDVK

SEQ ID NO: 88471 - protein, 9 aa, synthetic construct
  source 1..9: note = Seed: VVVGAGDVG (KRAS G13D)
IVVLAPDVL

SEQ ID NO: 88472 - protein, 9 aa, synthetic construct
  source 1..9: note = Seed: VVVGAGDVG (KRAS G13D)
IVVLAPDVM

SEQ ID NO: 88473 - protein, 9 aa, synthetic construct
  source 1..9: note = Seed: VVVGAGDVG (KRAS G13D)
IVVLAPDVN

SEQ ID NO: 88474 - protein, 9 aa, synthetic construct
  source 1..9: note = Seed: VVVGAGDVG (KRAS G13D)
IVVLAPDVP

SEQ ID NO: 88475 - protein, 9 aa, synthetic construct
  source 1..9: note = Seed: VVVGAGDVG (KRAS G13D)
IVVLAPDVQ

SEQ ID NO: 88476 - protein, 9 aa, synthetic construct
  source 1..9: note = Seed: VVVGAGDVG (KRAS G13D)
IVVLAPDVR

SEQ ID NO: 88477 - protein, 9 aa, synthetic construct
  source 1..9: note = Seed: VVVGAGDVG (KRAS G13D)
IVVLAPDVS

SEQ ID NO: 88478 - protein, 9 aa, synthetic construct
  source 1..9: note = Seed: VVVGAGDVG (KRAS G13D)
IVVLAPDVT

SEQ ID NO: 88479 - protein, 9 aa, synthetic construct
  source 1..9: note = Seed: VVVGAGDVG (KRAS G13D)
IVVLAPDVV

SEQ ID NO: 88480 - protein, 9 aa, synthetic construct
  source 1..9: note = Seed: VVVGAGDVG (KRAS G13D)
IVVLAPDVW

SEQ ID NO: 88481 - protein, 9 aa, synthetic construct
  source 1..9: note = Seed: VVVGAGDVG (KRAS G13D)
IVVLAPDVY

SEQ ID NO: 88482 - protein, 9 aa, synthetic construct
  source 1..9: note = Seed: VVVGAGDVG (KRAS G13D)
IVVLAQDVS

SEQ ID NO: 88483 - protein, 9 aa, synthetic construct
  source 1..9: note = Seed: VVVGAGDVG (KRAS G13D)
IVVLARDVA

SEQ ID NO: 88484 - protein, 9 aa, synthetic construct
  source 1..9: note = Seed: VVVGAGDVG (KRAS G13D)
IVVLASDVA

SEQ ID NO: 88485 - protein, 9 aa, synthetic construct
  source 1..9: note = Seed: VVVGAGDVG (KRAS G13D)
IVVLASDVD

SEQ ID NO: 88486 - protein, 9 aa, synthetic construct
  source 1..9: note = Seed: VVVGAGDVG (KRAS G13D)
IVVLASDVE

SEQ ID NO: 88487 - protein, 9 aa, synthetic construct
  source 1..9: note = Seed: VVVGAGDVG (KRAS G13D)
IVVLASDVF

SEQ ID NO: 88488 - protein, 9 aa, synthetic construct
  source 1..9: note = Seed: VVVGAGDVG (KRAS G13D)
IVVLASDVG

SEQ ID NO: 88489 - protein, 9 aa, synthetic construct
  source 1..9: note = Seed: VVVGAGDVG (KRAS G13D)
IVVLASDVH

SEQ ID NO: 88490 - protein, 9 aa, synthetic construct
  source 1..9: note = Seed: VVVGAGDVG (KRAS G13D)
IVVLASDVI

SEQ ID NO: 88491 - protein, 9 aa, synthetic construct
  source 1..9: note = Seed: VVVGAGDVG (KRAS G13D)
IVVLASDVK

SEQ ID NO: 88492 - protein, 9 aa, synthetic construct
  source 1..9: note = Seed: VVVGAGDVG (KRAS G13D)
IVVLASDVL

SEQ ID NO: 88493 - protein, 9 aa, synthetic construct
  source 1..9: note = Seed: VVVGAGDVG (KRAS G13D)
IVVLASDVM

SEQ ID NO: 88494 - protein, 9 aa, synthetic construct
  source 1..9: note = Seed: VVVGAGDVG (KRAS G13D)
IVVLASDVN

SEQ ID NO: 88495 - protein, 9 aa, synthetic construct
  source 1..9: note = Seed: VVVGAGDVG (KRAS G13D)
IVVLASDVP

SEQ ID NO: 88496 - protein, 9 aa, synthetic construct
  source 1..9: note = Seed: VVVGAGDVG (KRAS G13D)
IVVLASDVQ

SEQ ID NO: 88497 - protein, 9 aa, synthetic construct
  source 1..9: note = Seed: VVVGAGDVG (KRAS G13D)
IVVLASDVR

SEQ ID NO: 88498 - protein, 9 aa, synthetic construct
  source 1..9: note = Seed: VVVGAGDVG (KRAS G13D)
IVVLASDVS

SEQ ID NO: 88499 - protein, 9 aa, synthetic construct
  source 1..9: note = Seed: VVVGAGDVG (KRAS G13D)
IVVLASDVT

SEQ ID NO: 88500 - protein, 9 aa, synthetic construct
  source 1..9: note = Seed: VVVGAGDVG (KRAS G13D)
IVVLASDVV

SEQ ID NO: 88501 - protein, 9 aa, synthetic construct
  source 1..9: note = Seed: VVVGAGDVG (KRAS G13D)
IVVLASDVY

SEQ ID NO: 88502 - protein, 9 aa, synthetic construct
  source 1..9: note = Seed: VVVGAGDVG (KRAS G13D)
IVVLATDVA

SEQ ID NO: 88503 - protein, 9 aa, synthetic construct
  source 1..9: note = Seed: VVVGAGDVG (KRAS G13D)
IVVLATDVG

SEQ ID NO: 88504 - protein, 9 aa, synthetic construct
  source 1..9: note = Seed: VVVGAGDVG (KRAS G13D)
IVVLATDVH

SEQ ID NO: 88505 - protein, 9 aa, synthetic construct
  source 1..9: note = Seed: VVVGAGDVG (KRAS G13D)
IVVLATDVI

SEQ ID NO: 88506 - protein, 9 aa, synthetic construct
  source 1..9: note = Seed: VVVGAGDVG (KRAS G13D)
IVVLATDVK

SEQ ID NO: 88507 - protein, 9 aa, synthetic construct
  source 1..9: note = Seed: VVVGAGDVG (KRAS G13D)
IVVLATDVL

SEQ ID NO: 88508 - protein, 9 aa, synthetic construct
  source 1..9: note = Seed: VVVGAGDVG (KRAS G13D)
IVVLATDVM

SEQ ID NO: 88509 - protein, 9 aa, synthetic construct
  source 1..9: note = Seed: VVVGAGDVG (KRAS G13D)
IVVLATDVN

SEQ ID NO: 88510 - protein, 9 aa, synthetic construct
  source 1..9: note = Seed: VVVGAGDVG (KRAS G13D)
IVVLATDVP

SEQ ID NO: 88511 - protein, 9 aa, synthetic construct
  source 1..9: note = Seed: VVVGAGDVG (KRAS G13D)
IVVLATDVQ

SEQ ID NO: 88512 - protein, 9 aa, synthetic construct
  source 1..9: note = Seed: VVVGAGDVG (KRAS G13D)
IVVLATDVR

SEQ ID NO: 88513 - protein, 9 aa, synthetic construct
  source 1..9: note = Seed: VVVGAGDVG (KRAS G13D)
IVVLATDVS

SEQ ID NO: 88514 - protein, 9 aa, synthetic construct
  source 1..9: note = Seed: VVVGAGDVG (KRAS G13D)
IVVLATDVT

SEQ ID NO: 88515 - protein, 9 aa, synthetic construct
  source 1..9: note = Seed: VVVGAGDVG (KRAS G13D)
IVVLATDVV

SEQ ID NO: 88516 - protein, 9 aa, synthetic construct
  source 1..9: note = Seed: VVVGAGDVG (KRAS G13D)
IVVLAVDVA

SEQ ID NO: 88517 - protein, 9 aa, synthetic construct
  source 1..9: note = Seed: VVVGAGDVG (KRAS G13D)
IVVLAVDVH

SEQ ID NO: 88518 - protein, 9 aa, synthetic construct
  source 1..9: note = Seed: VVVGAGDVG (KRAS G13D)
IVVLAVDVN

SEQ ID NO: 88519 - protein, 9 aa, synthetic construct
  source 1..9: note = Seed: VVVGAGDVG (KRAS G13D)
IVVLAVDVP

SEQ ID NO: 88520 - protein, 9 aa, synthetic construct
  source 1..9: note = Seed: VVVGAGDVG (KRAS G13D)
IVVLAVDVQ

SEQ ID NO: 88521 - protein, 9 aa, synthetic construct
  source 1..9: note = Seed: VVVGAGDVG (KRAS G13D)
IVVLAVDVS

SEQ ID NO: 88522 - protein, 9 aa, synthetic construct
  source 1..9: note = Seed: VVVGAGDVG (KRAS G13D)
IVVMAADVA

SEQ ID NO: 88523 - protein, 9 aa, synthetic construct
  source 1..9: note = Seed: VVVGAGDVG (KRAS G13D)
IVVMAADVD

SEQ ID NO: 88524 - protein, 9 aa, synthetic construct
  source 1..9: note = Seed: VVVGAGDVG (KRAS G13D)
IVVMAADVE

SEQ ID NO: 88525 - protein, 9 aa, synthetic construct
  source 1..9: note = Seed: VVVGAGDVG (KRAS G13D)
IVVMAADVF

SEQ ID NO: 88526 - protein, 9 aa, synthetic construct
  source 1..9: note = Seed: VVVGAGDVG (KRAS G13D)
IVVMAADVG

SEQ ID NO: 88527 - protein, 9 aa, synthetic construct
  source 1..9: note = Seed: VVVGAGDVG (KRAS G13D)
IVVMAADVH

SEQ ID NO: 88528 - protein, 9 aa, synthetic construct
  source 1..9: note = Seed: VVVGAGDVG (KRAS G13D)
IVVMAADVI

SEQ ID NO: 88529 - protein, 9 aa, synthetic construct
  source 1..9: note = Seed: VVVGAGDVG (KRAS G13D)
IVVMAADVK

SEQ ID NO: 88530 - protein, 9 aa, synthetic construct
  source 1..9: note = Seed: VVVGAGDVG (KRAS G13D)
IVVMAADVL

SEQ ID NO: 88531 - protein, 9 aa, synthetic construct
  source 1..9: note = Seed: VVVGAGDVG (KRAS G13D)
IVVMAADVM

SEQ ID NO: 88532 - protein, 9 aa, synthetic construct
  source 1..9: note = Seed: VVVGAGDVG (KRAS G13D)
IVVMAADVN

SEQ ID NO: 88533 - protein, 9 aa, synthetic construct
  source 1..9: note = Seed: VVVGAGDVG (KRAS G13D)
IVVMAADVP

SEQ ID NO: 88534 - protein, 9 aa, synthetic construct
  source 1..9: note = Seed: VVVGAGDVG (KRAS G13D)
IVVMAADVQ

SEQ ID NO: 88535 - protein, 9 aa, synthetic construct
  source 1..9: note = Seed: VVVGAGDVG (KRAS G13D)
IVVMAADVR

SEQ ID NO: 88536 - protein, 9 aa, synthetic construct
  source 1..9: note = Seed: VVVGAGDVG (KRAS G13D)
IVVMAADVS

SEQ ID NO: 88537 - protein, 9 aa, synthetic construct
  source 1..9: note = Seed: VVVGAGDVG (KRAS G13D)
IVVMAADVT

SEQ ID NO: 88538 - protein, 9 aa, synthetic construct
  source 1..9: note = Seed: VVVGAGDVG (KRAS G13D)
IVVMAADVV

SEQ ID NO: 88539 - protein, 9 aa, synthetic construct
  source 1..9: note = Seed: VVVGAGDVG (KRAS G13D)
IVVMAADVY

SEQ ID NO: 88540 - protein, 9 aa, synthetic construct
  source 1..9: note = Seed: VVVGAGDVG (KRAS G13D)
IVVMADDVA

SEQ ID NO: 88541 - protein, 9 aa, synthetic construct
  source 1..9: note = Seed: VVVGAGDVG (KRAS G13D)
IVVMADDVF

SEQ ID NO: 88542 - protein, 9 aa, synthetic construct
  source 1..9: note = Seed: VVVGAGDVG (KRAS G13D)
IVVMADDVG

SEQ ID NO: 88543 - protein, 9 aa, synthetic construct
  source 1..9: note = Seed: VVVGAGDVG (KRAS G13D)
IVVMADDVH

SEQ ID NO: 88544 - protein, 9 aa, synthetic construct
  source 1..9: note = Seed: VVVGAGDVG (KRAS G13D)
IVVMADDVI

SEQ ID NO: 88545 - protein, 9 aa, synthetic construct
  source 1..9: note = Seed: VVVGAGDVG (KRAS G13D)
IVVMADDVL

SEQ ID NO: 88546 - protein, 9 aa, synthetic construct
  source 1..9: note = Seed: VVVGAGDVG (KRAS G13D)
IVVMADDVM

SEQ ID NO: 88547 - protein, 9 aa, synthetic construct
  source 1..9: note = Seed: VVVGAGDVG (KRAS G13D)
IVVMADDVN

SEQ ID NO: 88548 - protein, 9 aa, synthetic construct
  source 1..9: note = Seed: VVVGAGDVG (KRAS G13D)
IVVMADDVQ

SEQ ID NO: 88549 - protein, 9 aa, synthetic construct
  source 1..9: note = Seed: VVVGAGDVG (KRAS G13D)
IVVMADDVR

SEQ ID NO: 88550 - protein, 9 aa, synthetic construct
  source 1..9: note = Seed: VVVGAGDVG (KRAS G13D)
IVVMADDVS

SEQ ID NO: 88551 - protein, 9 aa, synthetic construct
  source 1..9: note = Seed: VVVGAGDVG (KRAS G13D)
IVVMADDVT

SEQ ID NO: 88552 - protein, 9 aa, synthetic construct
  source 1..9: note = Seed: VVVGAGDVG (KRAS G13D)
IVVMADDVV

SEQ ID NO: 88553 - protein, 9 aa, synthetic construct
  source 1..9: note = Seed: VVVGAGDVG (KRAS G13D)
IVVMADDVY

SEQ ID NO: 88554 - protein, 9 aa, synthetic construct
  source 1..9: note = Seed: VVVGAGDVG (KRAS G13D)
IVVMAEDVA

SEQ ID NO: 88555 - protein, 9 aa, synthetic construct
  source 1..9: note = Seed: VVVGAGDVG (KRAS G13D)
IVVMAEDVH

SEQ ID NO: 88556 - protein, 9 aa, synthetic construct
  source 1..9: note = Seed: VVVGAGDVG (KRAS G13D)
IVVMAEDVN

SEQ ID NO: 88557 - protein, 9 aa, synthetic construct
  source 1..9: note = Seed: VVVGAGDVG (KRAS G13D)
IVVMAEDVQ

SEQ ID NO: 88558 - protein, 9 aa, synthetic construct
  source 1..9: note = Seed: VVVGAGDVG (KRAS G13D)
IVVMAEDVS

SEQ ID NO: 88559 - protein, 9 aa, synthetic construct
  source 1..9: note = Seed: VVVGAGDVG (KRAS G13D)
IVVMAEDVT

SEQ ID NO: 88560 - protein, 9 aa, synthetic construct
  source 1..9: note = Seed: VVVGAGDVG (KRAS G13D)
IVVMAEDVV

SEQ ID NO: 88561 - protein, 9 aa, synthetic construct
  source 1..9: note = Seed: VVVGAGDVG (KRAS G13D)
IVVMAGDVA

SEQ ID NO: 88562 - protein, 9 aa, synthetic construct
  source 1..9: note = Seed: VVVGAGDVG (KRAS G13D)
IVVMAGDVG

SEQ ID NO: 88563 - protein, 9 aa, synthetic construct
  source 1..9: note = Seed: VVVGAGDVG (KRAS G13D)
IVVMAGDVH

SEQ ID NO: 88564 - protein, 9 aa, synthetic construct
  source 1..9: note = Seed: VVVGAGDVG (KRAS G13D)
IVVMAGDVI

SEQ ID NO: 88565 - protein, 9 aa, synthetic construct
  source 1..9: note = Seed: VVVGAGDVG (KRAS G13D)
IVVMAGDVK

SEQ ID NO: 88566 - protein, 9 aa, synthetic construct
  source 1..9: note = Seed: VVVGAGDVG (KRAS G13D)
IVVMAGDVL

SEQ ID NO: 88567 - protein, 9 aa, synthetic construct
  source 1..9: note = Seed: VVVGAGDVG (KRAS G13D)
IVVMAGDVM

SEQ ID NO: 88568 - protein, 9 aa, synthetic construct
  source 1..9: note = Seed: VVVGAGDVG (KRAS G13D)
IVVMAGDVN

SEQ ID NO: 88569 - protein, 9 aa, synthetic construct
  source 1..9: note = Seed: VVVGAGDVG (KRAS G13D)
IVVMAGDVP

SEQ ID NO: 88570 - protein, 9 aa, synthetic construct
  source 1..9: note = Seed: VVVGAGDVG (KRAS G13D)
IVVMAGDVQ

SEQ ID NO: 88571 - protein, 9 aa, synthetic construct
  source 1..9: note = Seed: VVVGAGDVG (KRAS G13D)
IVVMAGDVR

SEQ ID NO: 88572 - protein, 9 aa, synthetic construct
  source 1..9: note = Seed: VVVGAGDVG (KRAS G13D)
IVVMAGDVS

SEQ ID NO: 88573 - protein, 9 aa, synthetic construct
  source 1..9: note = Seed: VVVGAGDVG (KRAS G13D)
IVVMAGDVT

SEQ ID NO: 88574 - protein, 9 aa, synthetic construct
  source 1..9: note = Seed: VVVGAGDVG (KRAS G13D)
IVVMAGDVV

SEQ ID NO: 88575 - protein, 9 aa, synthetic construct
  source 1..9: note = Seed: VVVGAGDVG (KRAS G13D)
IVVMAHDVA

SEQ ID NO: 88576 - protein, 9 aa, synthetic construct
  source 1..9: note = Seed: VVVGAGDVG (KRAS G13D)
IVVMAHDVD

SEQ ID NO: 88577 - protein, 9 aa, synthetic construct
  source 1..9: note = Seed: VVVGAGDVG (KRAS G13D)
IVVMAHDVE

SEQ ID NO: 88578 - protein, 9 aa, synthetic construct
  source 1..9: note = Seed: VVVGAGDVG (KRAS G13D)
IVVMAHDVG

SEQ ID NO: 88579 - protein, 9 aa, synthetic construct
  source 1..9: note = Seed: VVVGAGDVG (KRAS G13D)
IVVMAHDVH

SEQ ID NO: 88580 - protein, 9 aa, synthetic construct
  source 1..9: note = Seed: VVVGAGDVG (KRAS G13D)
IVVMAHDVI

SEQ ID NO: 88581 - protein, 9 aa, synthetic construct
  source 1..9: note = Seed: VVVGAGDVG (KRAS G13D)
IVVMAHDVL

SEQ ID NO: 88582 - protein, 9 aa, synthetic construct
  source 1..9: note = Seed: VVVGAGDVG (KRAS G13D)
IVVMAHDVM

SEQ ID NO: 88583 - protein, 9 aa, synthetic construct
  source 1..9: note = Seed: VVVGAGDVG (KRAS G13D)
IVVMAHDVN

SEQ ID NO: 88584 - protein, 9 aa, synthetic construct
  source 1..9: note = Seed: VVVGAGDVG (KRAS G13D)
IVVMAHDVQ

SEQ ID NO: 88585 - protein, 9 aa, synthetic construct
  source 1..9: note = Seed: VVVGAGDVG (KRAS G13D)
IVVMAHDVS

SEQ ID NO: 88586 - protein, 9 aa, synthetic construct
  source 1..9: note = Seed: VVVGAGDVG (KRAS G13D)
IVVMAHDVT

SEQ ID NO: 88587 - protein, 9 aa, synthetic construct
  source 1..9: note = Seed: VVVGAGDVG (KRAS G13D)
IVVMAHDVV

SEQ ID NO: 88588 - protein, 9 aa, synthetic construct
  source 1..9: note = Seed: VVVGAGDVG (KRAS G13D)
IVVMAHDVY

SEQ ID NO: 88589 - protein, 9 aa, synthetic construct
  source 1..9: note = Seed: VVVGAGDVG (KRAS G13D)
IVVMAIDVA

SEQ ID NO: 88590 - protein, 9 aa, synthetic construct
  source 1..9: note = Seed: VVVGAGDVG (KRAS G13D)
IVVMAIDVD

SEQ ID NO: 88591 - protein, 9 aa, synthetic construct
  source 1..9: note = Seed: VVVGAGDVG (KRAS G13D)
IVVMAIDVE

SEQ ID NO: 88592 - protein, 9 aa, synthetic construct
  source 1..9: note = Seed: VVVGAGDVG (KRAS G13D)
IVVMAIDVG

SEQ ID NO: 88593 - protein, 9 aa, synthetic construct
  source 1..9: note = Seed: VVVGAGDVG (KRAS G13D)
IVVMAIDVH

SEQ ID NO: 88594 - protein, 9 aa, synthetic construct
  source 1..9: note = Seed: VVVGAGDVG (KRAS G13D)
IVVMAIDVI

SEQ ID NO: 88595 - protein, 9 aa, synthetic construct
  source 1..9: note = Seed: VVVGAGDVG (KRAS G13D)
IVVMAIDVK

SEQ ID NO: 88596 - protein, 9 aa, synthetic construct
  source 1..9: note = Seed: VVVGAGDVG (KRAS G13D)
IVVMAIDVL

SEQ ID NO: 88597 - protein, 9 aa, synthetic construct
  source 1..9: note = Seed: VVVGAGDVG (KRAS G13D)
IVVMAIDVM

SEQ ID NO: 88598 - protein, 9 aa, synthetic construct
  source 1..9: note = Seed: VVVGAGDVG (KRAS G13D)
IVVMAIDVN

SEQ ID NO: 88599 - protein, 9 aa, synthetic construct
  source 1..9: note = Seed: VVVGAGDVG (KRAS G13D)
IVVMAIDVQ

SEQ ID NO: 88600 - protein, 9 aa, synthetic construct
  source 1..9: note = Seed: VVVGAGDVG (KRAS G13D)
IVVMAIDVR

SEQ ID NO: 88601 - protein, 9 aa, synthetic construct
  source 1..9: note = Seed: VVVGAGDVG (KRAS G13D)
IVVMAIDVS

SEQ ID NO: 88602 - protein, 9 aa, synthetic construct
  source 1..9: note = Seed: VVVGAGDVG (KRAS G13D)
IVVMAIDVT

SEQ ID NO: 88603 - protein, 9 aa, synthetic construct
  source 1..9: note = Seed: VVVGAGDVG (KRAS G13D)
IVVMAIDVV

SEQ ID NO: 88604 - protein, 9 aa, synthetic construct
  source 1..9: note = Seed: VVVGAGDVG (KRAS G13D)
IVVMAIDVY

SEQ ID NO: 88605 - protein, 9 aa, synthetic construct
  source 1..9: note = Seed: VVVGAGDVG (KRAS G13D)
IVVMAKDVA

SEQ ID NO: 88606 - protein, 9 aa, synthetic construct
  source 1..9: note = Seed: VVVGAGDVG (KRAS G13D)
IVVMALDVA

SEQ ID NO: 88607 - protein, 9 aa, synthetic construct
  source 1..9: note = Seed: VVVGAGDVG (KRAS G13D)
IVVMALDVG

SEQ ID NO: 88608 - protein, 9 aa, synthetic construct
  source 1..9: note = Seed: VVVGAGDVG (KRAS G13D)
IVVMALDVH

SEQ ID NO: 88609 - protein, 9 aa, synthetic construct
  source 1..9: note = Seed: VVVGAGDVG (KRAS G13D)
IVVMALDVI

SEQ ID NO: 88610 - protein, 9 aa, synthetic construct
  source 1..9: note = Seed: VVVGAGDVG (KRAS G13D)
IVVMALDVM

SEQ ID NO: 88611 - protein, 9 aa, synthetic construct
  source 1..9: note = Seed: VVVGAGDVG (KRAS G13D)
IVVMALDVQ

SEQ ID NO: 88612 - protein, 9 aa, synthetic construct
  source 1..9: note = Seed: VVVGAGDVG (KRAS G13D)
IVVMALDVR

SEQ ID NO: 88613 - protein, 9 aa, synthetic construct
  source 1..9: note = Seed: VVVGAGDVG (KRAS G13D)
IVVMALDVS

SEQ ID NO: 88614 - protein, 9 aa, synthetic construct
  source 1..9: note = Seed: VVVGAGDVG (KRAS G13D)
IVVMALDVV

SEQ ID NO: 88615 - protein, 9 aa, synthetic construct
  source 1..9: note = Seed: VVVGAGDVG (KRAS G13D)
IVVMALDVY

SEQ ID NO: 88616 - protein, 9 aa, synthetic construct
  source 1..9: note = Seed: VVVGAGDVG (KRAS G13D)
IVVMAMDVA

SEQ ID NO: 88617 - protein, 9 aa, synthetic construct
  source 1..9: note = Seed: VVVGAGDVG (KRAS G13D)
IVVMAMDVE

SEQ ID NO: 88618 - protein, 9 aa, synthetic construct
  source 1..9: note = Seed: VVVGAGDVG (KRAS G13D)
IVVMAMDVG

SEQ ID NO: 88619 - protein, 9 aa, synthetic construct
  source 1..9: note = Seed: VVVGAGDVG (KRAS G13D)
IVVMAMDVS

SEQ ID NO: 88620 - protein, 9 aa, synthetic construct
  source 1..9: note = Seed: VVVGAGDVG (KRAS G13D)
IVVMAMDVV

SEQ ID NO: 88621 - protein, 9 aa, synthetic construct
  source 1..9: note = Seed: VVVGAGDVG (KRAS G13D)
IVVMAMDVY

SEQ ID NO: 88622 - protein, 9 aa, synthetic construct
  source 1..9: note = Seed: VVVGAGDVG (KRAS G13D)
IVVMANDVA

SEQ ID NO: 88623 - protein, 9 aa, synthetic construct
  source 1..9: note = Seed: VVVGAGDVG (KRAS G13D)
IVVMANDVC

SEQ ID NO: 88624 - protein, 9 aa, synthetic construct
  source 1..9: note = Seed: VVVGAGDVG (KRAS G13D)
IVVMANDVD

SEQ ID NO: 88625 - protein, 9 aa, synthetic construct
  source 1..9: note = Seed: VVVGAGDVG (KRAS G13D)
IVVMANDVE

SEQ ID NO: 88626 - protein, 9 aa, synthetic construct
  source 1..9: note = Seed: VVVGAGDVG (KRAS G13D)
IVVMANDVF

SEQ ID NO: 88627 - protein, 9 aa, synthetic construct
  source 1..9: note = Seed: VVVGAGDVG (KRAS G13D)
IVVMANDVG

SEQ ID NO: 88628 - protein, 9 aa, synthetic construct
  source 1..9: note = Seed: VVVGAGDVG (KRAS G13D)
IVVMANDVH

SEQ ID NO: 88629 - protein, 9 aa, synthetic construct
  source 1..9: note = Seed: VVVGAGDVG (KRAS G13D)
IVVMANDVI

SEQ ID NO: 88630 - protein, 9 aa, synthetic construct
  source 1..9: note = Seed: VVVGAGDVG (KRAS G13D)
IVVMANDVK

SEQ ID NO: 88631 - protein, 9 aa, synthetic construct
  source 1..9: note = Seed: VVVGAGDVG (KRAS G13D)
IVVMANDVL

SEQ ID NO: 88632 - protein, 9 aa, synthetic construct
  source 1..9: note = Seed: VVVGAGDVG (KRAS G13D)
IVVMANDVM

SEQ ID NO: 88633 - protein, 9 aa, synthetic construct
  source 1..9: note = Seed: VVVGAGDVG (KRAS G13D)
IVVMANDVN

SEQ ID NO: 88634 - protein, 9 aa, synthetic construct
  source 1..9: note = Seed: VVVGAGDVG (KRAS G13D)
IVVMANDVP

SEQ ID NO: 88635 - protein, 9 aa, synthetic construct
  source 1..9: note = Seed: VVVGAGDVG (KRAS G13D)
IVVMANDVQ

SEQ ID NO: 88636 - protein, 9 aa, synthetic construct
  source 1..9: note = Seed: VVVGAGDVG (KRAS G13D)
IVVMANDVR

SEQ ID NO: 88637 - protein, 9 aa, synthetic construct
  source 1..9: note = Seed: VVVGAGDVG (KRAS G13D)
IVVMANDVS

SEQ ID NO: 88638 - protein, 9 aa, synthetic construct
  source 1..9: note = Seed: VVVGAGDVG (KRAS G13D)
IVVMANDVT

SEQ ID NO: 88639 - protein, 9 aa, synthetic construct
  source 1..9: note = Seed: VVVGAGDVG (KRAS G13D)
IVVMANDVV

SEQ ID NO: 88640 - protein, 9 aa, synthetic construct
  source 1..9: note = Seed: VVVGAGDVG (KRAS G13D)
IVVMANDVW

SEQ ID NO: 88641 - protein, 9 aa, synthetic construct
  source 1..9: note = Seed: VVVGAGDVG (KRAS G13D)
IVVMANDVY

SEQ ID NO: 88642 - protein, 9 aa, synthetic construct
  source 1..9: note = Seed: VVVGAGDVG (KRAS G13D)
IVVMAPDVA

SEQ ID NO: 88643 - protein, 9 aa, synthetic construct
  source 1..9: note = Seed: VVVGAGDVG (KRAS G13D)
IVVMAPDVC

SEQ ID NO: 88644 - protein, 9 aa, synthetic construct
  source 1..9: note = Seed: VVVGAGDVG (KRAS G13D)
IVVMAPDVD

SEQ ID NO: 88645 - protein, 9 aa, synthetic construct
  source 1..9: note = Seed: VVVGAGDVG (KRAS G13D)
IVVMAPDVE

SEQ ID NO: 88646 - protein, 9 aa, synthetic construct
  source 1..9: note = Seed: VVVGAGDVG (KRAS G13D)
IVVMAPDVF

SEQ ID NO: 88647 - protein, 9 aa, synthetic construct
  source 1..9: note = Seed: VVVGAGDVG (KRAS G13D)
IVVMAPDVG

SEQ ID NO: 88648 - protein, 9 aa, synthetic construct
  source 1..9: note = Seed: VVVGAGDVG (KRAS G13D)
IVVMAPDVH

SEQ ID NO: 88649 - protein, 9 aa, synthetic construct
  source 1..9: note = Seed: VVVGAGDVG (KRAS G13D)
IVVMAPDVI

SEQ ID NO: 88650 - protein, 9 aa, synthetic construct
  source 1..9: note = Seed: VVVGAGDVG (KRAS G13D)
IVVMAPDVK

SEQ ID NO: 88651 - protein, 9 aa, synthetic construct
  source 1..9: note = Seed: VVVGAGDVG (KRAS G13D)
IVVMAPDVL

SEQ ID NO: 88652 - protein, 9 aa, synthetic construct
  source 1..9: note = Seed: VVVGAGDVG (KRAS G13D)
IVVMAPDVM

SEQ ID NO: 88653 - protein, 9 aa, synthetic construct
  source 1..9: note = Seed: VVVGAGDVG (KRAS G13D)
IVVMAPDVN

SEQ ID NO: 88654 - protein, 9 aa, synthetic construct
  source 1..9: note = Seed: VVVGAGDVG (KRAS G13D)
IVVMAPDVP

SEQ ID NO: 88655 - protein, 9 aa, synthetic construct
  source 1..9: note = Seed: VVVGAGDVG (KRAS G13D)
IVVMAPDVQ

SEQ ID NO: 88656 - protein, 9 aa, synthetic construct
  source 1..9: note = Seed: VVVGAGDVG (KRAS G13D)
IVVMAPDVR

SEQ ID NO: 88657 - protein, 9 aa, synthetic construct
  source 1..9: note = Seed: VVVGAGDVG (KRAS G13D)
IVVMAPDVS

SEQ ID NO: 88658 - protein, 9 aa, synthetic construct
  source 1..9: note = Seed: VVVGAGDVG (KRAS G13D)
IVVMAPDVT

SEQ ID NO: 88659 - protein, 9 aa, synthetic construct
  source 1..9: note = Seed: VVVGAGDVG (KRAS G13D)
IVVMAPDVV

SEQ ID NO: 88660 - protein, 9 aa, synthetic construct
  source 1..9: note = Seed: VVVGAGDVG (KRAS G13D)
IVVMAPDVW

SEQ ID NO: 88661 - protein, 9 aa, synthetic construct
  source 1..9: note = Seed: VVVGAGDVG (KRAS G13D)
IVVMAPDVY

SEQ ID NO: 88662 - protein, 9 aa, synthetic construct
  source 1..9: note = Seed: VVVGAGDVG (KRAS G13D)
IVVMAQDVA

SEQ ID NO: 88663 - protein, 9 aa, synthetic construct
  source 1..9: note = Seed: VVVGAGDVG (KRAS G13D)
IVVMAQDVH

SEQ ID NO: 88664 - protein, 9 aa, synthetic construct
  source 1..9: note = Seed: VVVGAGDVG (KRAS G13D)
IVVMAQDVI

SEQ ID NO: 88665 - protein, 9 aa, synthetic construct
  source 1..9: note = Seed: VVVGAGDVG (KRAS G13D)
IVVMAQDVL

SEQ ID NO: 88666 - protein, 9 aa, synthetic construct
  source 1..9: note = Seed: VVVGAGDVG (KRAS G13D)
IVVMAQDVM

SEQ ID NO: 88667 - protein, 9 aa, synthetic construct
  source 1..9: note = Seed: VVVGAGDVG (KRAS G13D)
IVVMAQDVN

SEQ ID NO: 88668 - protein, 9 aa, synthetic construct
  source 1..9: note = Seed: VVVGAGDVG (KRAS G13D)
IVVMAQDVQ

SEQ ID NO: 88669 - protein, 9 aa, synthetic construct
  source 1..9: note = Seed: VVVGAGDVG (KRAS G13D)
IVVMAQDVS

SEQ ID NO: 88670 - protein, 9 aa, synthetic construct
  source 1..9: note = Seed: VVVGAGDVG (KRAS G13D)
IVVMAQDVV

SEQ ID NO: 88671 - protein, 9 aa, synthetic construct
  source 1..9: note = Seed: VVVGAGDVG (KRAS G13D)
IVVMARDVA

SEQ ID NO: 88672 - protein, 9 aa, synthetic construct
  source 1..9: note = Seed: VVVGAGDVG (KRAS G13D)
IVVMARDVQ

SEQ ID NO: 88673 - protein, 9 aa, synthetic construct
  source 1..9: note = Seed: VVVGAGDVG (KRAS G13D)
IVVMARDVS

SEQ ID NO: 88674 - protein, 9 aa, synthetic construct
  source 1..9: note = Seed: VVVGAGDVG (KRAS G13D)
IVVMASDVA

SEQ ID NO: 88675 - protein, 9 aa, synthetic construct
  source 1..9: note = Seed: VVVGAGDVG (KRAS G13D)
IVVMASDVD

SEQ ID NO: 88676 - protein, 9 aa, synthetic construct
  source 1..9: note = Seed: VVVGAGDVG (KRAS G13D)
IVVMASDVE

SEQ ID NO: 88677 - protein, 9 aa, synthetic construct
  source 1..9: note = Seed: VVVGAGDVG (KRAS G13D)
IVVMASDVF

SEQ ID NO: 88678 - protein, 9 aa, synthetic construct
  source 1..9: note = Seed: VVVGAGDVG (KRAS G13D)
IVVMASDVG

SEQ ID NO: 88679 - protein, 9 aa, synthetic construct
  source 1..9: note = Seed: VVVGAGDVG (KRAS G13D)
IVVMASDVH

SEQ ID NO: 88680 - protein, 9 aa, synthetic construct
  source 1..9: note = Seed: VVVGAGDVG (KRAS G13D)
IVVMASDVI

SEQ ID NO: 88681 - protein, 9 aa, synthetic construct
  source 1..9: note = Seed: VVVGAGDVG (KRAS G13D)
IVVMASDVK

SEQ ID NO: 88682 - protein, 9 aa, synthetic construct
  source 1..9: note = Seed: VVVGAGDVG (KRAS G13D)
IVVMASDVL

SEQ ID NO: 88683 - protein, 9 aa, synthetic construct
  source 1..9: note = Seed: VVVGAGDVG (KRAS G13D)
IVVMASDVM

SEQ ID NO: 88684 - protein, 9 aa, synthetic construct
  source 1..9: note = Seed: VVVGAGDVG (KRAS G13D)
IVVMASDVN

SEQ ID NO: 88685 - protein, 9 aa, synthetic construct
  source 1..9: note = Seed: VVVGAGDVG (KRAS G13D)
IVVMASDVP

SEQ ID NO: 88686 - protein, 9 aa, synthetic construct
  source 1..9: note = Seed: VVVGAGDVG (KRAS G13D)
IVVMASDVQ

SEQ ID NO: 88687 - protein, 9 aa, synthetic construct
  source 1..9: note = Seed: VVVGAGDVG (KRAS G13D)
IVVMASDVR

SEQ ID NO: 88688 - protein, 9 aa, synthetic construct
  source 1..9: note = Seed: VVVGAGDVG (KRAS G13D)
IVVMASDVS

SEQ ID NO: 88689 - protein, 9 aa, synthetic construct
  source 1..9: note = Seed: VVVGAGDVG (KRAS G13D)
IVVMASDVT

SEQ ID NO: 88690 - protein, 9 aa, synthetic construct
  source 1..9: note = Seed: VVVGAGDVG (KRAS G13D)
IVVMASDVV

SEQ ID NO: 88691 - protein, 9 aa, synthetic construct
  source 1..9: note = Seed: VVVGAGDVG (KRAS G13D)
IVVMASDVY

SEQ ID NO: 88692 - protein, 9 aa, synthetic construct
  source 1..9: note = Seed: VVVGAGDVG (KRAS G13D)
IVVMATDVA

SEQ ID NO: 88693 - protein, 9 aa, synthetic construct
  source 1..9: note = Seed: VVVGAGDVG (KRAS G13D)
IVVMATDVD

SEQ ID NO: 88694 - protein, 9 aa, synthetic construct
  source 1..9: note = Seed: VVVGAGDVG (KRAS G13D)
IVVMATDVE

SEQ ID NO: 88695 - protein, 9 aa, synthetic construct
  source 1..9: note = Seed: VVVGAGDVG (KRAS G13D)
IVVMATDVF

SEQ ID NO: 88696 - protein, 9 aa, synthetic construct
  source 1..9: note = Seed: VVVGAGDVG (KRAS G13D)
IVVMATDVG

SEQ ID NO: 88697 - protein, 9 aa, synthetic construct
  source 1..9: note = Seed: VVVGAGDVG (KRAS G13D)
IVVMATDVH

SEQ ID NO: 88698 - protein, 9 aa, synthetic construct
  source 1..9: note = Seed: VVVGAGDVG (KRAS G13D)
IVVMATDVI

SEQ ID NO: 88699 - protein, 9 aa, synthetic construct
  source 1..9: note = Seed: VVVGAGDVG (KRAS G13D)
IVVMATDVK

SEQ ID NO: 88700 - protein, 9 aa, synthetic construct
  source 1..9: note = Seed: VVVGAGDVG (KRAS G13D)
IVVMATDVL

SEQ ID NO: 88701 - protein, 9 aa, synthetic construct
  source 1..9: note = Seed: VVVGAGDVG (KRAS G13D)
IVVMATDVM

SEQ ID NO: 88702 - protein, 9 aa, synthetic construct
  source 1..9: note = Seed: VVVGAGDVG (KRAS G13D)
IVVMATDVN

SEQ ID NO: 88703 - protein, 9 aa, synthetic construct
  source 1..9: note = Seed: VVVGAGDVG (KRAS G13D)
IVVMATDVP

SEQ ID NO: 88704 - protein, 9 aa, synthetic construct
  source 1..9: note = Seed: VVVGAGDVG (KRAS G13D)
IVVMATDVQ

SEQ ID NO: 88705 - protein, 9 aa, synthetic construct
  source 1..9: note = Seed: VVVGAGDVG (KRAS G13D)
IVVMATDVR

SEQ ID NO: 88706 - protein, 9 aa, synthetic construct
  source 1..9: note = Seed: VVVGAGDVG (KRAS G13D)
IVVMATDVS

SEQ ID NO: 88707 - protein, 9 aa, synthetic construct
  source 1..9: note = Seed: VVVGAGDVG (KRAS G13D)
IVVMATDVT

SEQ ID NO: 88708 - protein, 9 aa, synthetic construct
  source 1..9: note = Seed: VVVGAGDVG (KRAS G13D)
IVVMATDVV

SEQ ID NO: 88709 - protein, 9 aa, synthetic construct
  source 1..9: note = Seed: VVVGAGDVG (KRAS G13D)
IVVMATDVY

SEQ ID NO: 88710 - protein, 9 aa, synthetic construct
  source 1..9: note = Seed: VVVGAGDVG (KRAS G13D)
IVVMAVDVA

SEQ ID NO: 88711 - protein, 9 aa, synthetic construct
  source 1..9: note = Seed: VVVGAGDVG (KRAS G13D)
IVVMAVDVE

SEQ ID NO: 88712 - protein, 9 aa, synthetic construct
  source 1..9: note = Seed: VVVGAGDVG (KRAS G13D)
IVVMAVDVG

SEQ ID NO: 88713 - protein, 9 aa, synthetic construct
  source 1..9: note = Seed: VVVGAGDVG (KRAS G13D)
IVVMAVDVH

SEQ ID NO: 88714 - protein, 9 aa, synthetic construct
  source 1..9: note = Seed: VVVGAGDVG (KRAS G13D)
IVVMAVDVI

SEQ ID NO: 88715 - protein, 9 aa, synthetic construct
  source 1..9: note = Seed: VVVGAGDVG (KRAS G13D)
IVVMAVDVK

SEQ ID NO: 88716 - protein, 9 aa, synthetic construct
  source 1..9: note = Seed: VVVGAGDVG (KRAS G13D)
IVVMAVDVL

SEQ ID NO: 88717 - protein, 9 aa, synthetic construct
  source 1..9: note = Seed: VVVGAGDVG (KRAS G13D)
IVVMAVDVM

SEQ ID NO: 88718 - protein, 9 aa, synthetic construct
  source 1..9: note = Seed: VVVGAGDVG (KRAS G13D)
IVVMAVDVN

SEQ ID NO: 88719 - protein, 9 aa, synthetic construct
  source 1..9: note = Seed: VVVGAGDVG (KRAS G13D)
IVVMAVDVP

SEQ ID NO: 88720 - protein, 9 aa, synthetic construct
  source 1..9: note = Seed: VVVGAGDVG (KRAS G13D)
IVVMAVDVQ

SEQ ID NO: 88721 - protein, 9 aa, synthetic construct
  source 1..9: note = Seed: VVVGAGDVG (KRAS G13D)
IVVMAVDVR

SEQ ID NO: 88722 - protein, 9 aa, synthetic construct
  source 1..9: note = Seed: VVVGAGDVG (KRAS G13D)
IVVMAVDVS

SEQ ID NO: 88723 - protein, 9 aa, synthetic construct
  source 1..9: note = Seed: VVVGAGDVG (KRAS G13D)
IVVMAVDVT

SEQ ID NO: 88724 - protein, 9 aa, synthetic construct
  source 1..9: note = Seed: VVVGAGDVG (KRAS G13D)
IVVMAVDVV

SEQ ID NO: 88725 - protein, 9 aa, synthetic construct
  source 1..9: note = Seed: VVVGAGDVG (KRAS G13D)
IVVMAVDVY

SEQ ID NO: 88726 - protein, 9 aa, synthetic construct
  source 1..9: note = Seed: VVVGAGDVG (KRAS G13D)
IVVNAADVA

SEQ ID NO: 88727 - protein, 9 aa, synthetic construct
  source 1..9: note = Seed: VVVGAGDVG (KRAS G13D)
IVVNAADVC

SEQ ID NO: 88728 - protein, 9 aa, synthetic construct
  source 1..9: note = Seed: VVVGAGDVG (KRAS G13D)
IVVNAADVD

SEQ ID NO: 88729 - protein, 9 aa, synthetic construct
  source 1..9: note = Seed: VVVGAGDVG (KRAS G13D)
IVVNAADVE

SEQ ID NO: 88730 - protein, 9 aa, synthetic construct
  source 1..9: note = Seed: VVVGAGDVG (KRAS G13D)
IVVNAADVF

SEQ ID NO: 88731 - protein, 9 aa, synthetic construct
  source 1..9: note = Seed: VVVGAGDVG (KRAS G13D)
IVVNAADVG

SEQ ID NO: 88732 - protein, 9 aa, synthetic construct
  source 1..9: note = Seed: VVVGAGDVG (KRAS G13D)
IVVNAADVH

SEQ ID NO: 88733 - protein, 9 aa, synthetic construct
  source 1..9: note = Seed: VVVGAGDVG (KRAS G13D)
IVVNAADVI

SEQ ID NO: 88734 - protein, 9 aa, synthetic construct
  source 1..9: note = Seed: VVVGAGDVG (KRAS G13D)
IVVNAADVL

SEQ ID NO: 88735 - protein, 9 aa, synthetic construct
  source 1..9: note = Seed: VVVGAGDVG (KRAS G13D)
IVVNAADVM

SEQ ID NO: 88736 - protein, 9 aa, synthetic construct
  source 1..9: note = Seed: VVVGAGDVG (KRAS G13D)
IVVNAADVN

SEQ ID NO: 88737 - protein, 9 aa, synthetic construct
  source 1..9: note = Seed: VVVGAGDVG (KRAS G13D)
IVVNAADVQ

SEQ ID NO: 88738 - protein, 9 aa, synthetic construct
  source 1..9: note = Seed: VVVGAGDVG (KRAS G13D)
IVVNAADVS

SEQ ID NO: 88739 - protein, 9 aa, synthetic construct
  source 1..9: note = Seed: VVVGAGDVG (KRAS G13D)
IVVNAADVT

SEQ ID NO: 88740 - protein, 9 aa, synthetic construct
  source 1..9: note = Seed: VVVGAGDVG (KRAS G13D)
IVVNAADVV

SEQ ID NO: 88741 - protein, 9 aa, synthetic construct
  source 1..9: note = Seed: VVVGAGDVG (KRAS G13D)
IVVNAADVY

SEQ ID NO: 88742 - protein, 9 aa, synthetic construct
  source 1..9: note = Seed: VVVGAGDVG (KRAS G13D)
IVVNADDVA

SEQ ID NO: 88743 - protein, 9 aa, synthetic construct
  source 1..9: note = Seed: VVVGAGDVG (KRAS G13D)
IVVNADDVI

SEQ ID NO: 88744 - protein, 9 aa, synthetic construct
  source 1..9: note = Seed: VVVGAGDVG (KRAS G13D)
IVVNADDVL

SEQ ID NO: 88745 - protein, 9 aa, synthetic construct
  source 1..9: note = Seed: VVVGAGDVG (KRAS G13D)
IVVNADDVV

SEQ ID NO: 88746 - protein, 9 aa, synthetic construct
  source 1..9: note = Seed: VVVGAGDVG (KRAS G13D)
IVVNAGDVA

SEQ ID NO: 88747 - protein, 9 aa, synthetic construct
  source 1..9: note = Seed: VVVGAGDVG (KRAS G13D)
IVVNAGDVS

SEQ ID NO: 88748 - protein, 9 aa, synthetic construct
  source 1..9: note = Seed: VVVGAGDVG (KRAS G13D)
IVVNAGDVV

SEQ ID NO: 88749 - protein, 9 aa, synthetic construct
  source 1..9: note = Seed: VVVGAGDVG (KRAS G13D)
IVVNAIDVA

SEQ ID NO: 88750 - protein, 9 aa, synthetic construct
  source 1..9: note = Seed: VVVGAGDVG (KRAS G13D)
IVVNAIDVF

SEQ ID NO: 88751 - protein, 9 aa, synthetic construct
  source 1..9: note = Seed: VVVGAGDVG (KRAS G13D)
IVVNAIDVI

SEQ ID NO: 88752 - protein, 9 aa, synthetic construct
  source 1..9: note = Seed: VVVGAGDVG (KRAS G13D)
IVVNAIDVL

SEQ ID NO: 88753 - protein, 9 aa, synthetic construct
  source 1..9: note = Seed: VVVGAGDVG (KRAS G13D)
IVVNAIDVM

SEQ ID NO: 88754 - protein, 9 aa, synthetic construct
  source 1..9: note = Seed: VVVGAGDVG (KRAS G13D)
IVVNAIDVQ

SEQ ID NO: 88755 - protein, 9 aa, synthetic construct
  source 1..9: note = Seed: VVVGAGDVG (KRAS G13D)
IVVNAIDVS

SEQ ID NO: 88756 - protein, 9 aa, synthetic construct
  source 1..9: note = Seed: VVVGAGDVG (KRAS G13D)
IVVNAIDVT

SEQ ID NO: 88757 - protein, 9 aa, synthetic construct
  source 1..9: note = Seed: VVVGAGDVG (KRAS G13D)
IVVNAIDVV

SEQ ID NO: 88758 - protein, 9 aa, synthetic construct
  source 1..9: note = Seed: VVVGAGDVG (KRAS G13D)
IVVNAIDVY

SEQ ID NO: 88759 - protein, 9 aa, synthetic construct
  source 1..9: note = Seed: VVVGAGDVG (KRAS G13D)
IVVNALDVA

SEQ ID NO: 88760 - protein, 9 aa, synthetic construct
  source 1..9: note = Seed: VVVGAGDVG (KRAS G13D)
IVVNALDVF

SEQ ID NO: 88761 - protein, 9 aa, synthetic construct
  source 1..9: note = Seed: VVVGAGDVG (KRAS G13D)
IVVNALDVI

SEQ ID NO: 88762 - protein, 9 aa, synthetic construct
  source 1..9: note = Seed: VVVGAGDVG (KRAS G13D)
IVVNALDVL

SEQ ID NO: 88763 - protein, 9 aa, synthetic construct
  source 1..9: note = Seed: VVVGAGDVG (KRAS G13D)
IVVNALDVM

SEQ ID NO: 88764 - protein, 9 aa, synthetic construct
  source 1..9: note = Seed: VVVGAGDVG (KRAS G13D)
IVVNALDVQ

SEQ ID NO: 88765 - protein, 9 aa, synthetic construct
  source 1..9: note = Seed: VVVGAGDVG (KRAS G13D)
IVVNALDVS

SEQ ID NO: 88766 - protein, 9 aa, synthetic construct
  source 1..9: note = Seed: VVVGAGDVG (KRAS G13D)
IVVNALDVV

SEQ ID NO: 88767 - protein, 9 aa, synthetic construct
  source 1..9: note = Seed: VVVGAGDVG (KRAS G13D)
IVVNALDVY

SEQ ID NO: 88768 - protein, 9 aa, synthetic construct
  source 1..9: note = Seed: VVVGAGDVG (KRAS G13D)
IVVNAMDVA

SEQ ID NO: 88769 - protein, 9 aa, synthetic construct
  source 1..9: note = Seed: VVVGAGDVG (KRAS G13D)
IVVNAMDVI

SEQ ID NO: 88770 - protein, 9 aa, synthetic construct
  source 1..9: note = Seed: VVVGAGDVG (KRAS G13D)
IVVNAMDVL

SEQ ID NO: 88771 - protein, 9 aa, synthetic construct
  source 1..9: note = Seed: VVVGAGDVG (KRAS G13D)
IVVNAMDVM

SEQ ID NO: 88772 - protein, 9 aa, synthetic construct
  source 1..9: note = Seed: VVVGAGDVG (KRAS G13D)
IVVNAMDVS

SEQ ID NO: 88773 - protein, 9 aa, synthetic construct
  source 1..9: note = Seed: VVVGAGDVG (KRAS G13D)
IVVNAMDVV

SEQ ID NO: 88774 - protein, 9 aa, synthetic construct
  source 1..9: note = Seed: VVVGAGDVG (KRAS G13D)
IVVNANDVA

SEQ ID NO: 88775 - protein, 9 aa, synthetic construct
  source 1..9: note = Seed: VVVGAGDVG (KRAS G13D)
IVVNANDVC

SEQ ID NO: 88776 - protein, 9 aa, synthetic construct
  source 1..9: note = Seed: VVVGAGDVG (KRAS G13D)
IVVNANDVD

SEQ ID NO: 88777 - protein, 9 aa, synthetic construct
  source 1..9: note = Seed: VVVGAGDVG (KRAS G13D)
IVVNANDVE

SEQ ID NO: 88778 - protein, 9 aa, synthetic construct
  source 1..9: note = Seed: VVVGAGDVG (KRAS G13D)
IVVNANDVF

SEQ ID NO: 88779 - protein, 9 aa, synthetic construct
  source 1..9: note = Seed: VVVGAGDVG (KRAS G13D)
IVVNANDVG

SEQ ID NO: 88780 - protein, 9 aa, synthetic construct
  source 1..9: note = Seed: VVVGAGDVG (KRAS G13D)
IVVNANDVH

SEQ ID NO: 88781 - protein, 9 aa, synthetic construct
  source 1..9: note = Seed: VVVGAGDVG (KRAS G13D)
IVVNANDVI

SEQ ID NO: 88782 - protein, 9 aa, synthetic construct
  source 1..9: note = Seed: VVVGAGDVG (KRAS G13D)
IVVNANDVL

SEQ ID NO: 88783 - protein, 9 aa, synthetic construct
  source 1..9: note = Seed: VVVGAGDVG (KRAS G13D)
IVVNANDVM

SEQ ID NO: 88784 - protein, 9 aa, synthetic construct
  source 1..9: note = Seed: VVVGAGDVG (KRAS G13D)
IVVNANDVN

SEQ ID NO: 88785 - protein, 9 aa, synthetic construct
  source 1..9: note = Seed: VVVGAGDVG (KRAS G13D)
IVVNANDVQ

SEQ ID NO: 88786 - protein, 9 aa, synthetic construct
  source 1..9: note = Seed: VVVGAGDVG (KRAS G13D)
IVVNANDVS

SEQ ID NO: 88787 - protein, 9 aa, synthetic construct
  source 1..9: note = Seed: VVVGAGDVG (KRAS G13D)
IVVNANDVT

SEQ ID NO: 88788 - protein, 9 aa, synthetic construct
  source 1..9: note = Seed: VVVGAGDVG (KRAS G13D)
IVVNANDVV

SEQ ID NO: 88789 - protein, 9 aa, synthetic construct
  source 1..9: note = Seed: VVVGAGDVG (KRAS G13D)
IVVNANDVY

SEQ ID NO: 88790 - protein, 9 aa, synthetic construct
  source 1..9: note = Seed: VVVGAGDVG (KRAS G13D)
IVVNAPDVA

SEQ ID NO: 88791 - protein, 9 aa, synthetic construct
  source 1..9: note = Seed: VVVGAGDVG (KRAS G13D)
IVVNASDVA

SEQ ID NO: 88792 - protein, 9 aa, synthetic construct
  source 1..9: note = Seed: VVVGAGDVG (KRAS G13D)
IVVNASDVD

SEQ ID NO: 88793 - protein, 9 aa, synthetic construct
  source 1..9: note = Seed: VVVGAGDVG (KRAS G13D)
IVVNASDVG

SEQ ID NO: 88794 - protein, 9 aa, synthetic construct
  source 1..9: note = Seed: VVVGAGDVG (KRAS G13D)
IVVNASDVH

SEQ ID NO: 88795 - protein, 9 aa, synthetic construct
  source 1..9: note = Seed: VVVGAGDVG (KRAS G13D)
IVVNASDVI

SEQ ID NO: 88796 - protein, 9 aa, synthetic construct
  source 1..9: note = Seed: VVVGAGDVG (KRAS G13D)
IVVNASDVL

SEQ ID NO: 88797 - protein, 9 aa, synthetic construct
  source 1..9: note = Seed: VVVGAGDVG (KRAS G13D)
IVVNASDVM

SEQ ID NO: 88798 - protein, 9 aa, synthetic construct
  source 1..9: note = Seed: VVVGAGDVG (KRAS G13D)
IVVNASDVN

SEQ ID NO: 88799 - protein, 9 aa, synthetic construct
  source 1..9: note = Seed: VVVGAGDVG (KRAS G13D)
IVVNASDVQ

SEQ ID NO: 88800 - protein, 9 aa, synthetic construct
  source 1..9: note = Seed: VVVGAGDVG (KRAS G13D)
IVVNASDVS

SEQ ID NO: 88801 - protein, 9 aa, synthetic construct
  source 1..9: note = Seed: VVVGAGDVG (KRAS G13D)
IVVNASDVT

SEQ ID NO: 88802 - protein, 9 aa, synthetic construct
  source 1..9: note = Seed: VVVGAGDVG (KRAS G13D)
IVVNASDVV

SEQ ID NO: 88803 - protein, 9 aa, synthetic construct
  source 1..9: note = Seed: VVVGAGDVG (KRAS G13D)
IVVNATDVA

SEQ ID NO: 88804 - protein, 9 aa, synthetic construct
  source 1..9: note = Seed: VVVGAGDVG (KRAS G13D)
IVVNATDVD

SEQ ID NO: 88805 - protein, 9 aa, synthetic construct
  source 1..9: note = Seed: VVVGAGDVG (KRAS G13D)
IVVNATDVE

SEQ ID NO: 88806 - protein, 9 aa, synthetic construct
  source 1..9: note = Seed: VVVGAGDVG (KRAS G13D)
IVVNATDVG

SEQ ID NO: 88807 - protein, 9 aa, synthetic construct
  source 1..9: note = Seed: VVVGAGDVG (KRAS G13D)
IVVNATDVH

SEQ ID NO: 88808 - protein, 9 aa, synthetic construct
  source 1..9: note = Seed: VVVGAGDVG (KRAS G13D)
IVVNATDVI

SEQ ID NO: 88809 - protein, 9 aa, synthetic construct
  source 1..9: note = Seed: VVVGAGDVG (KRAS G13D)
IVVNATDVL

SEQ ID NO: 88810 - protein, 9 aa, synthetic construct
  source 1..9: note = Seed: VVVGAGDVG (KRAS G13D)
IVVNATDVM

SEQ ID NO: 88811 - protein, 9 aa, synthetic construct
  source 1..9: note = Seed: VVVGAGDVG (KRAS G13D)
IVVNATDVN

SEQ ID NO: 88812 - protein, 9 aa, synthetic construct
  source 1..9: note = Seed: VVVGAGDVG (KRAS G13D)
IVVNATDVQ

SEQ ID NO: 88813 - protein, 9 aa, synthetic construct
  source 1..9: note = Seed: VVVGAGDVG (KRAS G13D)
IVVNATDVS

SEQ ID NO: 88814 - protein, 9 aa, synthetic construct
  source 1..9: note = Seed: VVVGAGDVG (KRAS G13D)
IVVNATDVT

SEQ ID NO: 88815 - protein, 9 aa, synthetic construct
  source 1..9: note = Seed: VVVGAGDVG (KRAS G13D)
IVVNATDVV

SEQ ID NO: 88816 - protein, 9 aa, synthetic construct
  source 1..9: note = Seed: VVVGAGDVG (KRAS G13D)
IVVNAVDVA

SEQ ID NO: 88817 - protein, 9 aa, synthetic construct
  source 1..9: note = Seed: VVVGAGDVG (KRAS G13D)
IVVNAVDVF

SEQ ID NO: 88818 - protein, 9 aa, synthetic construct
  source 1..9: note = Seed: VVVGAGDVG (KRAS G13D)
IVVNAVDVH

SEQ ID NO: 88819 - protein, 9 aa, synthetic construct
  source 1..9: note = Seed: VVVGAGDVG (KRAS G13D)
IVVNAVDVI

SEQ ID NO: 88820 - protein, 9 aa, synthetic construct
  source 1..9: note = Seed: VVVGAGDVG (KRAS G13D)
IVVNAVDVL

SEQ ID NO: 88821 - protein, 9 aa, synthetic construct
  source 1..9: note = Seed: VVVGAGDVG (KRAS G13D)
IVVNAVDVM

SEQ ID NO: 88822 - protein, 9 aa, synthetic construct
  source 1..9: note = Seed: VVVGAGDVG (KRAS G13D)
IVVNAVDVN

SEQ ID NO: 88823 - protein, 9 aa, synthetic construct
  source 1..9: note = Seed: VVVGAGDVG (KRAS G13D)
IVVNAVDVQ

SEQ ID NO: 88824 - protein, 9 aa, synthetic construct
  source 1..9: note = Seed: VVVGAGDVG (KRAS G13D)
IVVNAVDVS

SEQ ID NO: 88825 - protein, 9 aa, synthetic construct
  source 1..9: note = Seed: VVVGAGDVG (KRAS G13D)
IVVNAVDVT

SEQ ID NO: 88826 - protein, 9 aa, synthetic construct
  source 1..9: note = Seed: VVVGAGDVG (KRAS G13D)
IVVNAVDVV

SEQ ID NO: 88827 - protein, 9 aa, synthetic construct
  source 1..9: note = Seed: VVVGAGDVG (KRAS G13D)
IVVNAVDVY

SEQ ID NO: 88828 - protein, 9 aa, synthetic construct
  source 1..9: note = Seed: VVVGAGDVG (KRAS G13D)
IVVQAADVA

SEQ ID NO: 88829 - protein, 9 aa, synthetic construct
  source 1..9: note = Seed: VVVGAGDVG (KRAS G13D)
IVVQAADVC

SEQ ID NO: 88830 - protein, 9 aa, synthetic construct
  source 1..9: note = Seed: VVVGAGDVG (KRAS G13D)
IVVQAADVD

SEQ ID NO: 88831 - protein, 9 aa, synthetic construct
  source 1..9: note = Seed: VVVGAGDVG (KRAS G13D)
IVVQAADVE

SEQ ID NO: 88832 - protein, 9 aa, synthetic construct
  source 1..9: note = Seed: VVVGAGDVG (KRAS G13D)
IVVQAADVF

SEQ ID NO: 88833 - protein, 9 aa, synthetic construct
  source 1..9: note = Seed: VVVGAGDVG (KRAS G13D)
IVVQAADVG

SEQ ID NO: 88834 - protein, 9 aa, synthetic construct
  source 1..9: note = Seed: VVVGAGDVG (KRAS G13D)
IVVQAADVH

SEQ ID NO: 88835 - protein, 9 aa, synthetic construct
  source 1..9: note = Seed: VVVGAGDVG (KRAS G13D)
IVVQAADVI

SEQ ID NO: 88836 - protein, 9 aa, synthetic construct
  source 1..9: note = Seed: VVVGAGDVG (KRAS G13D)
IVVQAADVL

SEQ ID NO: 88837 - protein, 9 aa, synthetic construct
  source 1..9: note = Seed: VVVGAGDVG (KRAS G13D)
IVVQAADVM

SEQ ID NO: 88838 - protein, 9 aa, synthetic construct
  source 1..9: note = Seed: VVVGAGDVG (KRAS G13D)
IVVQAADVN

SEQ ID NO: 88839 - protein, 9 aa, synthetic construct
  source 1..9: note = Seed: VVVGAGDVG (KRAS G13D)
IVVQAADVP

SEQ ID NO: 88840 - protein, 9 aa, synthetic construct
  source 1..9: note = Seed: VVVGAGDVG (KRAS G13D)
IVVQAADVQ

SEQ ID NO: 88841 - protein, 9 aa, synthetic construct
  source 1..9: note = Seed: VVVGAGDVG (KRAS G13D)
IVVQAADVR

SEQ ID NO: 88842 - protein, 9 aa, synthetic construct
  source 1..9: note = Seed: VVVGAGDVG (KRAS G13D)
IVVQAADVS

SEQ ID NO: 88843 - protein, 9 aa, synthetic construct
  source 1..9: note = Seed: VVVGAGDVG (KRAS G13D)
IVVQAADVT

SEQ ID NO: 88844 - protein, 9 aa, synthetic construct
  source 1..9: note = Seed: VVVGAGDVG (KRAS G13D)
IVVQAADVV

SEQ ID NO: 88845 - protein, 9 aa, synthetic construct
  source 1..9: note = Seed: VVVGAGDVG (KRAS G13D)
IVVQAADVY

SEQ ID NO: 88846 - protein, 9 aa, synthetic construct
  source 1..9: note = Seed: VVVGAGDVG (KRAS G13D)
IVVQADDVA

SEQ ID NO: 88847 - protein, 9 aa, synthetic construct
  source 1..9: note = Seed: VVVGAGDVG (KRAS G13D)
IVVQADDVS

SEQ ID NO: 88848 - protein, 9 aa, synthetic construct
  source 1..9: note = Seed: VVVGAGDVG (KRAS G13D)
IVVQADDVV

SEQ ID NO: 88849 - protein, 9 aa, synthetic construct
  source 1..9: note = Seed: VVVGAGDVG (KRAS G13D)
IVVQAEDVA

SEQ ID NO: 88850 - protein, 9 aa, synthetic construct
  source 1..9: note = Seed: VVVGAGDVG (KRAS G13D)
IVVQAEDVS

SEQ ID NO: 88851 - protein, 9 aa, synthetic construct
  source 1..9: note = Seed: VVVGAGDVG (KRAS G13D)
IVVQAFDVS

SEQ ID NO: 88852 - protein, 9 aa, synthetic construct
  source 1..9: note = Seed: VVVGAGDVG (KRAS G13D)
IVVQAGDVA

SEQ ID NO: 88853 - protein, 9 aa, synthetic construct
  source 1..9: note = Seed: VVVGAGDVG (KRAS G13D)
IVVQAGDVG

SEQ ID NO: 88854 - protein, 9 aa, synthetic construct
  source 1..9: note = Seed: VVVGAGDVG (KRAS G13D)
IVVQAGDVH

SEQ ID NO: 88855 - protein, 9 aa, synthetic construct
  source 1..9: note = Seed: VVVGAGDVG (KRAS G13D)
IVVQAGDVI

SEQ ID NO: 88856 - protein, 9 aa, synthetic construct
  source 1..9: note = Seed: VVVGAGDVG (KRAS G13D)
IVVQAGDVL

SEQ ID NO: 88857 - protein, 9 aa, synthetic construct
  source 1..9: note = Seed: VVVGAGDVG (KRAS G13D)
IVVQAGDVM

SEQ ID NO: 88858 - protein, 9 aa, synthetic construct
  source 1..9: note = Seed: VVVGAGDVG (KRAS G13D)
IVVQAGDVN

SEQ ID NO: 88859 - protein, 9 aa, synthetic construct
  source 1..9: note = Seed: VVVGAGDVG (KRAS G13D)
IVVQAGDVQ

SEQ ID NO: 88860 - protein, 9 aa, synthetic construct
  source 1..9: note = Seed: VVVGAGDVG (KRAS G13D)
IVVQAGDVS

SEQ ID NO: 88861 - protein, 9 aa, synthetic construct
  source 1..9: note = Seed: VVVGAGDVG (KRAS G13D)
IVVQAGDVT

SEQ ID NO: 88862 - protein, 9 aa, synthetic construct
  source 1..9: note = Seed: VVVGAGDVG (KRAS G13D)
IVVQAGDVV

SEQ ID NO: 88863 - protein, 9 aa, synthetic construct
  source 1..9: note = Seed: VVVGAGDVG (KRAS G13D)
IVVQAHDVA

SEQ ID NO: 88864 - protein, 9 aa, synthetic construct
  source 1..9: note = Seed: VVVGAGDVG (KRAS G13D)
IVVQAIDVA

SEQ ID NO: 88865 - protein, 9 aa, synthetic construct
  source 1..9: note = Seed: VVVGAGDVG (KRAS G13D)
IVVQAIDVE

SEQ ID NO: 88866 - protein, 9 aa, synthetic construct
  source 1..9: note = Seed: VVVGAGDVG (KRAS G13D)
IVVQAIDVF

SEQ ID NO: 88867 - protein, 9 aa, synthetic construct
  source 1..9: note = Seed: VVVGAGDVG (KRAS G13D)
IVVQAIDVG

SEQ ID NO: 88868 - protein, 9 aa, synthetic construct
  source 1..9: note = Seed: VVVGAGDVG (KRAS G13D)
IVVQAIDVH

SEQ ID NO: 88869 - protein, 9 aa, synthetic construct
  source 1..9: note = Seed: VVVGAGDVG (KRAS G13D)
IVVQAIDVI

SEQ ID NO: 88870 - protein, 9 aa, synthetic construct
  source 1..9: note = Seed: VVVGAGDVG (KRAS G13D)
IVVQAIDVL

SEQ ID NO: 88871 - protein, 9 aa, synthetic construct
  source 1..9: note = Seed: VVVGAGDVG (KRAS G13D)
IVVQAIDVM

SEQ ID NO: 88872 - protein, 9 aa, synthetic construct
  source 1..9: note = Seed: VVVGAGDVG (KRAS G13D)
IVVQAIDVN

SEQ ID NO: 88873 - protein, 9 aa, synthetic construct
  source 1..9: note = Seed: VVVGAGDVG (KRAS G13D)
IVVQAIDVQ

SEQ ID NO: 88874 - protein, 9 aa, synthetic construct
  source 1..9: note = Seed: VVVGAGDVG (KRAS G13D)
IVVQAIDVS

SEQ ID NO: 88875 - protein, 9 aa, synthetic construct
  source 1..9: note = Seed: VVVGAGDVG (KRAS G13D)
IVVQAIDVT

SEQ ID NO: 88876 - protein, 9 aa, synthetic construct
  source 1..9: note = Seed: VVVGAGDVG (KRAS G13D)
IVVQAIDVV

SEQ ID NO: 88877 - protein, 9 aa, synthetic construct
  source 1..9: note = Seed: VVVGAGDVG (KRAS G13D)
IVVQAIDVY

SEQ ID NO: 88878 - protein, 9 aa, synthetic construct
  source 1..9: note = Seed: VVVGAGDVG (KRAS G13D)
IVVQALDVA

SEQ ID NO: 88879 - protein, 9 aa, synthetic construct
  source 1..9: note = Seed: VVVGAGDVG (KRAS G13D)
IVVQALDVC

SEQ ID NO: 88880 - protein, 9 aa, synthetic construct
  source 1..9: note = Seed: VVVGAGDVG (KRAS G13D)
IVVQALDVG

SEQ ID NO: 88881 - protein, 9 aa, synthetic construct
  source 1..9: note = Seed: VVVGAGDVG (KRAS G13D)
IVVQALDVI

SEQ ID NO: 88882 - protein, 9 aa, synthetic construct
  source 1..9: note = Seed: VVVGAGDVG (KRAS G13D)
IVVQALDVL

SEQ ID NO: 88883 - protein, 9 aa, synthetic construct
  source 1..9: note = Seed: VVVGAGDVG (KRAS G13D)
IVVQALDVM

SEQ ID NO: 88884 - protein, 9 aa, synthetic construct
  source 1..9: note = Seed: VVVGAGDVG (KRAS G13D)
IVVQALDVS

SEQ ID NO: 88885 - protein, 9 aa, synthetic construct
  source 1..9: note = Seed: VVVGAGDVG (KRAS G13D)
IVVQALDVV

SEQ ID NO: 88886 - protein, 9 aa, synthetic construct
  source 1..9: note = Seed: VVVGAGDVG (KRAS G13D)
IVVQALDVY

SEQ ID NO: 88887 - protein, 9 aa, synthetic construct
  source 1..9: note = Seed: VVVGAGDVG (KRAS G13D)
IVVQAMDVA

SEQ ID NO: 88888 - protein, 9 aa, synthetic construct
  source 1..9: note = Seed: VVVGAGDVG (KRAS G13D)
IVVQAMDVG

SEQ ID NO: 88889 - protein, 9 aa, synthetic construct
  source 1..9: note = Seed: VVVGAGDVG (KRAS G13D)
IVVQANDVA

SEQ ID NO: 88890 - protein, 9 aa, synthetic construct
  source 1..9: note = Seed: VVVGAGDVG (KRAS G13D)
IVVQANDVC

SEQ ID NO: 88891 - protein, 9 aa, synthetic construct
  source 1..9: note = Seed: VVVGAGDVG (KRAS G13D)
IVVQANDVD

SEQ ID NO: 88892 - protein, 9 aa, synthetic construct
  source 1..9: note = Seed: VVVGAGDVG (KRAS G13D)
IVVQANDVE

SEQ ID NO: 88893 - protein, 9 aa, synthetic construct
  source 1..9: note = Seed: VVVGAGDVG (KRAS G13D)
IVVQANDVF

SEQ ID NO: 88894 - protein, 9 aa, synthetic construct
  source 1..9: note = Seed: VVVGAGDVG (KRAS G13D)
IVVQANDVG

SEQ ID NO: 88895 - protein, 9 aa, synthetic construct
  source 1..9: note = Seed: VVVGAGDVG (KRAS G13D)
IVVQANDVH

SEQ ID NO: 88896 - protein, 9 aa, synthetic construct
  source 1..9: note = Seed: VVVGAGDVG (KRAS G13D)
IVVQANDVI

SEQ ID NO: 88897 - protein, 9 aa, synthetic construct
  source 1..9: note = Seed: VVVGAGDVG (KRAS G13D)
IVVQANDVL

SEQ ID NO: 88898 - protein, 9 aa, synthetic construct
  source 1..9: note = Seed: VVVGAGDVG (KRAS G13D)
IVVQANDVM

SEQ ID NO: 88899 - protein, 9 aa, synthetic construct
  source 1..9: note = Seed: VVVGAGDVG (KRAS G13D)
IVVQANDVN

SEQ ID NO: 88900 - protein, 9 aa, synthetic construct
  source 1..9: note = Seed: VVVGAGDVG (KRAS G13D)
IVVQANDVQ

SEQ ID NO: 88901 - protein, 9 aa, synthetic construct
  source 1..9: note = Seed: VVVGAGDVG (KRAS G13D)
IVVQANDVS

SEQ ID NO: 88902 - protein, 9 aa, synthetic construct
  source 1..9: note = Seed: VVVGAGDVG (KRAS G13D)
IVVQANDVT

SEQ ID NO: 88903 - protein, 9 aa, synthetic construct
  source 1..9: note = Seed: VVVGAGDVG (KRAS G13D)
IVVQANDVV

SEQ ID NO: 88904 - protein, 9 aa, synthetic construct
  source 1..9: note = Seed: VVVGAGDVG (KRAS G13D)
IVVQANDVY

SEQ ID NO: 88905 - protein, 9 aa, synthetic construct
  source 1..9: note = Seed: VVVGAGDVG (KRAS G13D)
IVVQAPDVA

SEQ ID NO: 88906 - protein, 9 aa, synthetic construct
  source 1..9: note = Seed: VVVGAGDVG (KRAS G13D)
IVVQAPDVF

SEQ ID NO: 88907 - protein, 9 aa, synthetic construct
  source 1..9: note = Seed: VVVGAGDVG (KRAS G13D)
IVVQAPDVG

SEQ ID NO: 88908 - protein, 9 aa, synthetic construct
  source 1..9: note = Seed: VVVGAGDVG (KRAS G13D)
IVVQAPDVH

SEQ ID NO: 88909 - protein, 9 aa, synthetic construct
  source 1..9: note = Seed: VVVGAGDVG (KRAS G13D)
IVVQAPDVI

SEQ ID NO: 88910 - protein, 9 aa, synthetic construct
  source 1..9: note = Seed: VVVGAGDVG (KRAS G13D)
IVVQAPDVL

SEQ ID NO: 88911 - protein, 9 aa, synthetic construct
  source 1..9: note = Seed: VVVGAGDVG (KRAS G13D)
IVVQAPDVM

SEQ ID NO: 88912 - protein, 9 aa, synthetic construct
  source 1..9: note = Seed: VVVGAGDVG (KRAS G13D)
IVVQAPDVN

SEQ ID NO: 88913 - protein, 9 aa, synthetic construct
  source 1..9: note = Seed: VVVGAGDVG (KRAS G13D)
IVVQAPDVQ

SEQ ID NO: 88914 - protein, 9 aa, synthetic construct
  source 1..9: note = Seed: VVVGAGDVG (KRAS G13D)
IVVQAPDVS

SEQ ID NO: 88915 - protein, 9 aa, synthetic construct
  source 1..9: note = Seed: VVVGAGDVG (KRAS G13D)
IVVQAPDVT

SEQ ID NO: 88916 - protein, 9 aa, synthetic construct
  source 1..9: note = Seed: VVVGAGDVG (KRAS G13D)
IVVQAPDVV

SEQ ID NO: 88917 - protein, 9 aa, synthetic construct
  source 1..9: note = Seed: VVVGAGDVG (KRAS G13D)
IVVQAPDVY

SEQ ID NO: 88918 - protein, 9 aa, synthetic construct
  source 1..9: note = Seed: VVVGAGDVG (KRAS G13D)
IVVQASDVA

SEQ ID NO: 88919 - protein, 9 aa, synthetic construct
  source 1..9: note = Seed: VVVGAGDVG (KRAS G13D)
IVVQASDVC

SEQ ID NO: 88920 - protein, 9 aa, synthetic construct
  source 1..9: note = Seed: VVVGAGDVG (KRAS G13D)
IVVQASDVD

SEQ ID NO: 88921 - protein, 9 aa, synthetic construct
  source 1..9: note = Seed: VVVGAGDVG (KRAS G13D)
IVVQASDVE

SEQ ID NO: 88922 - protein, 9 aa, synthetic construct
  source 1..9: note = Seed: VVVGAGDVG (KRAS G13D)
IVVQASDVG

SEQ ID NO: 88923 - protein, 9 aa, synthetic construct
  source 1..9: note = Seed: VVVGAGDVG (KRAS G13D)
IVVQASDVH

SEQ ID NO: 88924 - protein, 9 aa, synthetic construct
  source 1..9: note = Seed: VVVGAGDVG (KRAS G13D)
IVVQASDVI

SEQ ID NO: 88925 - protein, 9 aa, synthetic construct
  source 1..9: note = Seed: VVVGAGDVG (KRAS G13D)
IVVQASDVL

SEQ ID NO: 88926 - protein, 9 aa, synthetic construct
  source 1..9: note = Seed: VVVGAGDVG (KRAS G13D)
IVVQASDVM

SEQ ID NO: 88927 - protein, 9 aa, synthetic construct
  source 1..9: note = Seed: VVVGAGDVG (KRAS G13D)
IVVQASDVN

SEQ ID NO: 88928 - protein, 9 aa, synthetic construct
  source 1..9: note = Seed: VVVGAGDVG (KRAS G13D)
IVVQASDVQ

SEQ ID NO: 88929 - protein, 9 aa, synthetic construct
  source 1..9: note = Seed: VVVGAGDVG (KRAS G13D)
IVVQASDVS

SEQ ID NO: 88930 - protein, 9 aa, synthetic construct
  source 1..9: note = Seed: VVVGAGDVG (KRAS G13D)
IVVQASDVT

SEQ ID NO: 88931 - protein, 9 aa, synthetic construct
  source 1..9: note = Seed: VVVGAGDVG (KRAS G13D)
IVVQASDVV

SEQ ID NO: 88932 - protein, 9 aa, synthetic construct
  source 1..9: note = Seed: VVVGAGDVG (KRAS G13D)
IVVQASDVY

SEQ ID NO: 88933 - protein, 9 aa, synthetic construct
  source 1..9: note = Seed: VVVGAGDVG (KRAS G13D)
IVVQATDVA

SEQ ID NO: 88934 - protein, 9 aa, synthetic construct
  source 1..9: note = Seed: VVVGAGDVG (KRAS G13D)
IVVQATDVD

SEQ ID NO: 88935 - protein, 9 aa, synthetic construct
  source 1..9: note = Seed: VVVGAGDVG (KRAS G13D)
IVVQATDVE

SEQ ID NO: 88936 - protein, 9 aa, synthetic construct
  source 1..9: note = Seed: VVVGAGDVG (KRAS G13D)
IVVQATDVF

SEQ ID NO: 88937 - protein, 9 aa, synthetic construct
  source 1..9: note = Seed: VVVGAGDVG (KRAS G13D)
IVVQATDVG

SEQ ID NO: 88938 - protein, 9 aa, synthetic construct
  source 1..9: note = Seed: VVVGAGDVG (KRAS G13D)
IVVQATDVH

SEQ ID NO: 88939 - protein, 9 aa, synthetic construct
  source 1..9: note = Seed: VVVGAGDVG (KRAS G13D)
IVVQATDVI

SEQ ID NO: 88940 - protein, 9 aa, synthetic construct
  source 1..9: note = Seed: VVVGAGDVG (KRAS G13D)
IVVQATDVK

SEQ ID NO: 88941 - protein, 9 aa, synthetic construct
  source 1..9: note = Seed: VVVGAGDVG (KRAS G13D)
IVVQATDVL

SEQ ID NO: 88942 - protein, 9 aa, synthetic construct
  source 1..9: note = Seed: VVVGAGDVG (KRAS G13D)
IVVQATDVM

SEQ ID NO: 88943 - protein, 9 aa, synthetic construct
  source 1..9: note = Seed: VVVGAGDVG (KRAS G13D)
IVVQATDVN

SEQ ID NO: 88944 - protein, 9 aa, synthetic construct
  source 1..9: note = Seed: VVVGAGDVG (KRAS G13D)
IVVQATDVP

SEQ ID NO: 88945 - protein, 9 aa, synthetic construct
  source 1..9: note = Seed: VVVGAGDVG (KRAS G13D)
IVVQATDVQ

SEQ ID NO: 88946 - protein, 9 aa, synthetic construct
  source 1..9: note = Seed: VVVGAGDVG (KRAS G13D)
IVVQATDVR

SEQ ID NO: 88947 - protein, 9 aa, synthetic construct
  source 1..9: note = Seed: VVVGAGDVG (KRAS G13D)
IVVQATDVS

SEQ ID NO: 88948 - protein, 9 aa, synthetic construct
  source 1..9: note = Seed: VVVGAGDVG (KRAS G13D)
IVVQATDVT

SEQ ID NO: 88949 - protein, 9 aa, synthetic construct
  source 1..9: note = Seed: VVVGAGDVG (KRAS G13D)
IVVQATDVV

SEQ ID NO: 88950 - protein, 9 aa, synthetic construct
  source 1..9: note = Seed: VVVGAGDVG (KRAS G13D)
IVVQATDVY

SEQ ID NO: 88951 - protein, 9 aa, synthetic construct
  source 1..9: note = Seed: VVVGAGDVG (KRAS G13D)
IVVQAVDVA

SEQ ID NO: 88952 - protein, 9 aa, synthetic construct
  source 1..9: note = Seed: VVVGAGDVG (KRAS G13D)
IVVQAVDVE

SEQ ID NO: 88953 - protein, 9 aa, synthetic construct
  source 1..9: note = Seed: VVVGAGDVG (KRAS G13D)
IVVQAVDVF

SEQ ID NO: 88954 - protein, 9 aa, synthetic construct
  source 1..9: note = Seed: VVVGAGDVG (KRAS G13D)
IVVQAVDVG

SEQ ID NO: 88955 - protein, 9 aa, synthetic construct
  source 1..9: note = Seed: VVVGAGDVG (KRAS G13D)
IVVQAVDVH

SEQ ID NO: 88956 - protein, 9 aa, synthetic construct
  source 1..9: note = Seed: VVVGAGDVG (KRAS G13D)
IVVQAVDVI

SEQ ID NO: 88957 - protein, 9 aa, synthetic construct
  source 1..9: note = Seed: VVVGAGDVG (KRAS G13D)
IVVQAVDVK

SEQ ID NO: 88958 - protein, 9 aa, synthetic construct
  source 1..9: note = Seed: VVVGAGDVG (KRAS G13D)
IVVQAVDVL

SEQ ID NO: 88959 - protein, 9 aa, synthetic construct
  source 1..9: note = Seed: VVVGAGDVG (KRAS G13D)
IVVQAVDVM

SEQ ID NO: 88960 - protein, 9 aa, synthetic construct
  source 1..9: note = Seed: VVVGAGDVG (KRAS G13D)
IVVQAVDVN

SEQ ID NO: 88961 - protein, 9 aa, synthetic construct
  source 1..9: note = Seed: VVVGAGDVG (KRAS G13D)
IVVQAVDVP

SEQ ID NO: 88962 - protein, 9 aa, synthetic construct
  source 1..9: note = Seed: VVVGAGDVG (KRAS G13D)
IVVQAVDVQ

SEQ ID NO: 88963 - protein, 9 aa, synthetic construct
  source 1..9: note = Seed: VVVGAGDVG (KRAS G13D)
IVVQAVDVR

SEQ ID NO: 88964 - protein, 9 aa, synthetic construct
  source 1..9: note = Seed: VVVGAGDVG (KRAS G13D)
IVVQAVDVS

SEQ ID NO: 88965 - protein, 9 aa, synthetic construct
  source 1..9: note = Seed: VVVGAGDVG (KRAS G13D)
IVVQAVDVT

SEQ ID NO: 88966 - protein, 9 aa, synthetic construct
  source 1..9: note = Seed: VVVGAGDVG (KRAS G13D)
IVVQAVDVV

SEQ ID NO: 88967 - protein, 9 aa, synthetic construct
  source 1..9: note = Seed: VVVGAGDVG (KRAS G13D)
IVVQAVDVY

SEQ ID NO: 88968 - protein, 9 aa, synthetic construct
  source 1..9: note = Seed: VVVGAGDVG (KRAS G13D)
IVVRANDVA

SEQ ID NO: 88969 - protein, 9 aa, synthetic construct
  source 1..9: note = Seed: VVVGAGDVG (KRAS G13D)
IVVRANDVM

SEQ ID NO: 88970 - protein, 9 aa, synthetic construct
  source 1..9: note = Seed: VVVGAGDVG (KRAS G13D)
IVVRANDVS

SEQ ID NO: 88971 - protein, 9 aa, synthetic construct
  source 1..9: note = Seed: VVVGAGDVG (KRAS G13D)
IVVRANDVV

SEQ ID NO: 88972 - protein, 9 aa, synthetic construct
  source 1..9: note = Seed: VVVGAGDVG (KRAS G13D)
IVVRASDVA

SEQ ID NO: 88973 - protein, 9 aa, synthetic construct
  source 1..9: note = Seed: VVVGAGDVG (KRAS G13D)
IVVSAADVA

SEQ ID NO: 88974 - protein, 9 aa, synthetic construct
  source 1..9: note = Seed: VVVGAGDVG (KRAS G13D)
IVVSAADVC

SEQ ID NO: 88975 - protein, 9 aa, synthetic construct
  source 1..9: note = Seed: VVVGAGDVG (KRAS G13D)
IVVSAADVD

SEQ ID NO: 88976 - protein, 9 aa, synthetic construct
  source 1..9: note = Seed: VVVGAGDVG (KRAS G13D)
IVVSAADVE

SEQ ID NO: 88977 - protein, 9 aa, synthetic construct
  source 1..9: note = Seed: VVVGAGDVG (KRAS G13D)
IVVSAADVF

SEQ ID NO: 88978 - protein, 9 aa, synthetic construct
  source 1..9: note = Seed: VVVGAGDVG (KRAS G13D)
IVVSAADVG

SEQ ID NO: 88979 - protein, 9 aa, synthetic construct
  source 1..9: note = Seed: VVVGAGDVG (KRAS G13D)
IVVSAADVH

SEQ ID NO: 88980 - protein, 9 aa, synthetic construct
  source 1..9: note = Seed: VVVGAGDVG (KRAS G13D)
IVVSAADVI

SEQ ID NO: 88981 - protein, 9 aa, synthetic construct
  source 1..9: note = Seed: VVVGAGDVG (KRAS G13D)
IVVSAADVL

SEQ ID NO: 88982 - protein, 9 aa, synthetic construct
  source 1..9: note = Seed: VVVGAGDVG (KRAS G13D)
IVVSAADVM

SEQ ID NO: 88983 - protein, 9 aa, synthetic construct
  source 1..9: note = Seed: VVVGAGDVG (KRAS G13D)
IVVSAADVN

SEQ ID NO: 88984 - protein, 9 aa, synthetic construct
  source 1..9: note = Seed: VVVGAGDVG (KRAS G13D)
IVVSAADVQ

SEQ ID NO: 88985 - protein, 9 aa, synthetic construct
  source 1..9: note = Seed: VVVGAGDVG (KRAS G13D)
IVVSAADVS

SEQ ID NO: 88986 - protein, 9 aa, synthetic construct
  source 1..9: note = Seed: VVVGAGDVG (KRAS G13D)
IVVSAADVT

SEQ ID NO: 88987 - protein, 9 aa, synthetic construct
  source 1..9: note = Seed: VVVGAGDVG (KRAS G13D)
IVVSAADVV

SEQ ID NO: 88988 - protein, 9 aa, synthetic construct
  source 1..9: note = Seed: VVVGAGDVG (KRAS G13D)
IVVSAADVY

SEQ ID NO: 88989 - protein, 9 aa, synthetic construct
  source 1..9: note = Seed: VVVGAGDVG (KRAS G13D)
IVVSADDVA

SEQ ID NO: 88990 - protein, 9 aa, synthetic construct
  source 1..9: note = Seed: VVVGAGDVG (KRAS G13D)
IVVSADDVI

SEQ ID NO: 88991 - protein, 9 aa, synthetic construct
  source 1..9: note = Seed: VVVGAGDVG (KRAS G13D)
IVVSADDVL

SEQ ID NO: 88992 - protein, 9 aa, synthetic construct
  source 1..9: note = Seed: VVVGAGDVG (KRAS G13D)
IVVSADDVM

SEQ ID NO: 88993 - protein, 9 aa, synthetic construct
  source 1..9: note = Seed: VVVGAGDVG (KRAS G13D)
IVVSADDVS

SEQ ID NO: 88994 - protein, 9 aa, synthetic construct
  source 1..9: note = Seed: VVVGAGDVG (KRAS G13D)
IVVSADDVV

SEQ ID NO: 88995 - protein, 9 aa, synthetic construct
  source 1..9: note = Seed: VVVGAGDVG (KRAS G13D)
IVVSAGDVA

SEQ ID NO: 88996 - protein, 9 aa, synthetic construct
  source 1..9: note = Seed: VVVGAGDVG (KRAS G13D)
IVVSAGDVH

SEQ ID NO: 88997 - protein, 9 aa, synthetic construct
  source 1..9: note = Seed: VVVGAGDVG (KRAS G13D)
IVVSAGDVL

SEQ ID NO: 88998 - protein, 9 aa, synthetic construct
  source 1..9: note = Seed: VVVGAGDVG (KRAS G13D)
IVVSAGDVM

SEQ ID NO: 88999 - protein, 9 aa, synthetic construct
  source 1..9: note = Seed: VVVGAGDVG (KRAS G13D)
IVVSAGDVN

SEQ ID NO: 89000 - protein, 9 aa, synthetic construct
  source 1..9: note = Seed: VVVGAGDVG (KRAS G13D)
IVVSAGDVQ

SEQ ID NO: 89001 - protein, 9 aa, synthetic construct
  source 1..9: note = Seed: VVVGAGDVG (KRAS G13D)
IVVSAGDVS

SEQ ID NO: 89002 - protein, 9 aa, synthetic construct
  source 1..9: note = Seed: VVVGAGDVG (KRAS G13D)
IVVSAGDVV

SEQ ID NO: 89003 - protein, 9 aa, synthetic construct
  source 1..9: note = Seed: VVVGAGDVG (KRAS G13D)
IVVSAIDVA

SEQ ID NO: 89004 - protein, 9 aa, synthetic construct
  source 1..9: note = Seed: VVVGAGDVG (KRAS G13D)
IVVSAIDVF

SEQ ID NO: 89005 - protein, 9 aa, synthetic construct
  source 1..9: note = Seed: VVVGAGDVG (KRAS G13D)
IVVSAIDVG

SEQ ID NO: 89006 - protein, 9 aa, synthetic construct
  source 1..9: note = Seed: VVVGAGDVG (KRAS G13D)
IVVSAIDVI

SEQ ID NO: 89007 - protein, 9 aa, synthetic construct
  source 1..9: note = Seed: VVVGAGDVG (KRAS G13D)
IVVSAIDVL

SEQ ID NO: 89008 - protein, 9 aa, synthetic construct
  source 1..9: note = Seed: VVVGAGDVG (KRAS G13D)
IVVSAIDVM

SEQ ID NO: 89009 - protein, 9 aa, synthetic construct
  source 1..9: note = Seed: VVVGAGDVG (KRAS G13D)
IVVSAIDVN

SEQ ID NO: 89010 - protein, 9 aa, synthetic construct
  source 1..9: note = Seed: VVVGAGDVG (KRAS G13D)
IVVSAIDVQ

SEQ ID NO: 89011 - protein, 9 aa, synthetic construct
  source 1..9: note = Seed: VVVGAGDVG (KRAS G13D)
IVVSAIDVS

SEQ ID NO: 89012 - protein, 9 aa, synthetic construct
  source 1..9: note = Seed: VVVGAGDVG (KRAS G13D)
IVVSAIDVT

SEQ ID NO: 89013 - protein, 9 aa, synthetic construct
  source 1..9: note = Seed: VVVGAGDVG (KRAS G13D)
IVVSAIDVV

SEQ ID NO: 89014 - protein, 9 aa, synthetic construct
  source 1..9: note = Seed: VVVGAGDVG (KRAS G13D)
IVVSAIDVY

SEQ ID NO: 89015 - protein, 9 aa, synthetic construct
  source 1..9: note = Seed: VVVGAGDVG (KRAS G13D)
IVVSALDVA

SEQ ID NO: 89016 - protein, 9 aa, synthetic construct
  source 1..9: note = Seed: VVVGAGDVG (KRAS G13D)
IVVSALDVF

SEQ ID NO: 89017 - protein, 9 aa, synthetic construct
  source 1..9: note = Seed: VVVGAGDVG (KRAS G13D)
IVVSALDVG

SEQ ID NO: 89018 - protein, 9 aa, synthetic construct
  source 1..9: note = Seed: VVVGAGDVG (KRAS G13D)
IVVSALDVI

SEQ ID NO: 89019 - protein, 9 aa, synthetic construct
  source 1..9: note = Seed: VVVGAGDVG (KRAS G13D)
IVVSALDVL

SEQ ID NO: 89020 - protein, 9 aa, synthetic construct
  source 1..9: note = Seed: VVVGAGDVG (KRAS G13D)
IVVSALDVM

SEQ ID NO: 89021 - protein, 9 aa, synthetic construct
  source 1..9: note = Seed: VVVGAGDVG (KRAS G13D)
IVVSALDVQ

SEQ ID NO: 89022 - protein, 9 aa, synthetic construct
  source 1..9: note = Seed: VVVGAGDVG (KRAS G13D)
IVVSALDVV

SEQ ID NO: 89023 - protein, 9 aa, synthetic construct
  source 1..9: note = Seed: VVVGAGDVG (KRAS G13D)
IVVSALDVY

SEQ ID NO: 89024 - protein, 9 aa, synthetic construct
  source 1..9: note = Seed: VVVGAGDVG (KRAS G13D)
IVVSAMDVA

SEQ ID NO: 89025 - protein, 9 aa, synthetic construct
  source 1..9: note = Seed: VVVGAGDVG (KRAS G13D)
IVVSAMDVI

SEQ ID NO: 89026 - protein, 9 aa, synthetic construct
  source 1..9: note = Seed: VVVGAGDVG (KRAS G13D)
IVVSAMDVL

SEQ ID NO: 89027 - protein, 9 aa, synthetic construct
  source 1..9: note = Seed: VVVGAGDVG (KRAS G13D)
IVVSAMDVM

SEQ ID NO: 89028 - protein, 9 aa, synthetic construct
  source 1..9: note = Seed: VVVGAGDVG (KRAS G13D)
IVVSAMDVQ

SEQ ID NO: 89029 - protein, 9 aa, synthetic construct
  source 1..9: note = Seed: VVVGAGDVG (KRAS G13D)
IVVSAMDVS

SEQ ID NO: 89030 - protein, 9 aa, synthetic construct
  source 1..9: note = Seed: VVVGAGDVG (KRAS G13D)
IVVSAMDVV

SEQ ID NO: 89031 - protein, 9 aa, synthetic construct
  source 1..9: note = Seed: VVVGAGDVG (KRAS G13D)
IVVSAMDVY

SEQ ID NO: 89032 - protein, 9 aa, synthetic construct
  source 1..9: note = Seed: VVVGAGDVG (KRAS G13D)
IVVSANDVA

SEQ ID NO: 89033 - protein, 9 aa, synthetic construct
  source 1..9: note = Seed: VVVGAGDVG (KRAS G13D)
IVVSANDVC

SEQ ID NO: 89034 - protein, 9 aa, synthetic construct
  source 1..9: note = Seed: VVVGAGDVG (KRAS G13D)
IVVSANDVD

SEQ ID NO: 89035 - protein, 9 aa, synthetic construct
  source 1..9: note = Seed: VVVGAGDVG (KRAS G13D)
IVVSANDVE

SEQ ID NO: 89036 - protein, 9 aa, synthetic construct
  source 1..9: note = Seed: VVVGAGDVG (KRAS G13D)
IVVSANDVF

SEQ ID NO: 89037 - protein, 9 aa, synthetic construct
  source 1..9: note = Seed: VVVGAGDVG (KRAS G13D)
IVVSANDVG

SEQ ID NO: 89038 - protein, 9 aa, synthetic construct
  source 1..9: note = Seed: VVVGAGDVG (KRAS G13D)
IVVSANDVH

SEQ ID NO: 89039 - protein, 9 aa, synthetic construct
  source 1..9: note = Seed: VVVGAGDVG (KRAS G13D)
IVVSANDVI

SEQ ID NO: 89040 - protein, 9 aa, synthetic construct
  source 1..9: note = Seed: VVVGAGDVG (KRAS G13D)
IVVSANDVK

SEQ ID NO: 89041 - protein, 9 aa, synthetic construct
  source 1..9: note = Seed: VVVGAGDVG (KRAS G13D)
IVVSANDVL

SEQ ID NO: 89042 - protein, 9 aa, synthetic construct
  source 1..9: note = Seed: VVVGAGDVG (KRAS G13D)
IVVSANDVM

SEQ ID NO: 89043 - protein, 9 aa, synthetic construct
  source 1..9: note = Seed: VVVGAGDVG (KRAS G13D)
IVVSANDVN

SEQ ID NO: 89044 - protein, 9 aa, synthetic construct
  source 1..9: note = Seed: VVVGAGDVG (KRAS G13D)
IVVSANDVP

SEQ ID NO: 89045 - protein, 9 aa, synthetic construct
  source 1..9: note = Seed: VVVGAGDVG (KRAS G13D)
IVVSANDVQ

SEQ ID NO: 89046 - protein, 9 aa, synthetic construct
  source 1..9: note = Seed: VVVGAGDVG (KRAS G13D)
IVVSANDVR

SEQ ID NO: 89047 - protein, 9 aa, synthetic construct
  source 1..9: note = Seed: VVVGAGDVG (KRAS G13D)
IVVSANDVS

SEQ ID NO: 89048 - protein, 9 aa, synthetic construct
  source 1..9: note = Seed: VVVGAGDVG (KRAS G13D)
IVVSANDVT

SEQ ID NO: 89049 - protein, 9 aa, synthetic construct
  source 1..9: note = Seed: VVVGAGDVG (KRAS G13D)
IVVSANDVV

SEQ ID NO: 89050 - protein, 9 aa, synthetic construct
  source 1..9: note = Seed: VVVGAGDVG (KRAS G13D)
IVVSANDVY

SEQ ID NO: 89051 - protein, 9 aa, synthetic construct
  source 1..9: note = Seed: VVVGAGDVG (KRAS G13D)
IVVSAPDVA

SEQ ID NO: 89052 - protein, 9 aa, synthetic construct
  source 1..9: note = Seed: VVVGAGDVG (KRAS G13D)
IVVSAPDVG

SEQ ID NO: 89053 - protein, 9 aa, synthetic construct
  source 1..9: note = Seed: VVVGAGDVG (KRAS G13D)
IVVSAPDVH

SEQ ID NO: 89054 - protein, 9 aa, synthetic construct
  source 1..9: note = Seed: VVVGAGDVG (KRAS G13D)
IVVSAPDVI

SEQ ID NO: 89055 - protein, 9 aa, synthetic construct
  source 1..9: note = Seed: VVVGAGDVG (KRAS G13D)
IVVSAPDVL

SEQ ID NO: 89056 - protein, 9 aa, synthetic construct
  source 1..9: note = Seed: VVVGAGDVG (KRAS G13D)
IVVSAPDVM

SEQ ID NO: 89057 - protein, 9 aa, synthetic construct
  source 1..9: note = Seed: VVVGAGDVG (KRAS G13D)
IVVSAPDVN

SEQ ID NO: 89058 - protein, 9 aa, synthetic construct
  source 1..9: note = Seed: VVVGAGDVG (KRAS G13D)
IVVSAPDVQ

SEQ ID NO: 89059 - protein, 9 aa, synthetic construct
  source 1..9: note = Seed: VVVGAGDVG (KRAS G13D)
IVVSAPDVS

SEQ ID NO: 89060 - protein, 9 aa, synthetic construct
  source 1..9: note = Seed: VVVGAGDVG (KRAS G13D)
IVVSAPDVT

SEQ ID NO: 89061 - protein, 9 aa, synthetic construct
  source 1..9: note = Seed: VVVGAGDVG (KRAS G13D)
IVVSAPDVV

SEQ ID NO: 89062 - protein, 9 aa, synthetic construct
  source 1..9: note = Seed: VVVGAGDVG (KRAS G13D)
IVVSASDVA

SEQ ID NO: 89063 - protein, 9 aa, synthetic construct
  source 1..9: note = Seed: VVVGAGDVG (KRAS G13D)
IVVSASDVC

SEQ ID NO: 89064 - protein, 9 aa, synthetic construct
  source 1..9: note = Seed: VVVGAGDVG (KRAS G13D)
IVVSASDVD

SEQ ID NO: 89065 - protein, 9 aa, synthetic construct
  source 1..9: note = Seed: VVVGAGDVG (KRAS G13D)
IVVSASDVF

SEQ ID NO: 89066 - protein, 9 aa, synthetic construct
  source 1..9: note = Seed: VVVGAGDVG (KRAS G13D)
IVVSASDVG

SEQ ID NO: 89067 - protein, 9 aa, synthetic construct
  source 1..9: note = Seed: VVVGAGDVG (KRAS G13D)
IVVSASDVH

SEQ ID NO: 89068 - protein, 9 aa, synthetic construct
  source 1..9: note = Seed: VVVGAGDVG (KRAS G13D)
IVVSASDVI

SEQ ID NO: 89069 - protein, 9 aa, synthetic construct
  source 1..9: note = Seed: VVVGAGDVG (KRAS G13D)
IVVSASDVL

SEQ ID NO: 89070 - protein, 9 aa, synthetic construct
  source 1..9: note = Seed: VVVGAGDVG (KRAS G13D)
IVVSASDVM

SEQ ID NO: 89071 - protein, 9 aa, synthetic construct
  source 1..9: note = Seed: VVVGAGDVG (KRAS G13D)
IVVSASDVN

SEQ ID NO: 89072 - protein, 9 aa, synthetic construct
  source 1..9: note = Seed: VVVGAGDVG (KRAS G13D)
IVVSASDVQ

SEQ ID NO: 89073 - protein, 9 aa, synthetic construct
  source 1..9: note = Seed: VVVGAGDVG (KRAS G13D)
IVVSASDVR

SEQ ID NO: 89074 - protein, 9 aa, synthetic construct
  source 1..9: note = Seed: VVVGAGDVG (KRAS G13D)
IVVSASDVS

SEQ ID NO: 89075 - protein, 9 aa, synthetic construct
  source 1..9: note = Seed: VVVGAGDVG (KRAS G13D)
IVVSASDVT

SEQ ID NO: 89076 - protein, 9 aa, synthetic construct
  source 1..9: note = Seed: VVVGAGDVG (KRAS G13D)
IVVSASDVV

SEQ ID NO: 89077 - protein, 9 aa, synthetic construct
  source 1..9: note = Seed: VVVGAGDVG (KRAS G13D)
IVVSASDVY

SEQ ID NO: 89078 - protein, 9 aa, synthetic construct
  source 1..9: note = Seed: VVVGAGDVG (KRAS G13D)
IVVSATDVA

SEQ ID NO: 89079 - protein, 9 aa, synthetic construct
  source 1..9: note = Seed: VVVGAGDVG (KRAS G13D)
IVVSATDVD

SEQ ID NO: 89080 - protein, 9 aa, synthetic construct
  source 1..9: note = Seed: VVVGAGDVG (KRAS G13D)
IVVSATDVE

SEQ ID NO: 89081 - protein, 9 aa, synthetic construct
  source 1..9: note = Seed: VVVGAGDVG (KRAS G13D)
IVVSATDVG

SEQ ID NO: 89082 - protein, 9 aa, synthetic construct
  source 1..9: note = Seed: VVVGAGDVG (KRAS G13D)
IVVSATDVH

SEQ ID NO: 89083 - protein, 9 aa, synthetic construct
  source 1..9: note = Seed: VVVGAGDVG (KRAS G13D)
IVVSATDVI

SEQ ID NO: 89084 - protein, 9 aa, synthetic construct
  source 1..9: note = Seed: VVVGAGDVG (KRAS G13D)
IVVSATDVL

SEQ ID NO: 89085 - protein, 9 aa, synthetic construct
  source 1..9: note = Seed: VVVGAGDVG (KRAS G13D)
IVVSATDVM

SEQ ID NO: 89086 - protein, 9 aa, synthetic construct
  source 1..9: note = Seed: VVVGAGDVG (KRAS G13D)
IVVSATDVN

SEQ ID NO: 89087 - protein, 9 aa, synthetic construct
  source 1..9: note = Seed: VVVGAGDVG (KRAS G13D)
IVVSATDVQ

SEQ ID NO: 89088 - protein, 9 aa, synthetic construct
  source 1..9: note = Seed: VVVGAGDVG (KRAS G13D)
IVVSATDVS

SEQ ID NO: 89089 - protein, 9 aa, synthetic construct
  source 1..9: note = Seed: VVVGAGDVG (KRAS G13D)
IVVSATDVT

SEQ ID NO: 89090 - protein, 9 aa, synthetic construct
  source 1..9: note = Seed: VVVGAGDVG (KRAS G13D)
IVVSATDVV

SEQ ID NO: 89091 - protein, 9 aa, synthetic construct
  source 1..9: note = Seed: VVVGAGDVG (KRAS G13D)
IVVSAVDVA

SEQ ID NO: 89092 - protein, 9 aa, synthetic construct
  source 1..9: note = Seed: VVVGAGDVG (KRAS G13D)
IVVSAVDVF

SEQ ID NO: 89093 - protein, 9 aa, synthetic construct
  source 1..9: note = Seed: VVVGAGDVG (KRAS G13D)
IVVSAVDVG

SEQ ID NO: 89094 - protein, 9 aa, synthetic construct
  source 1..9: note = Seed: VVVGAGDVG (KRAS G13D)
IVVSAVDVH

SEQ ID NO: 89095 - protein, 9 aa, synthetic construct
  source 1..9: note = Seed: VVVGAGDVG (KRAS G13D)
IVVSAVDVI

SEQ ID NO: 89096 - protein, 9 aa, synthetic construct
  source 1..9: note = Seed: VVVGAGDVG (KRAS G13D)
IVVSAVDVL

SEQ ID NO: 89097 - protein, 9 aa, synthetic construct
  source 1..9: note = Seed: VVVGAGDVG (KRAS G13D)
IVVSAVDVM

SEQ ID NO: 89098 - protein, 9 aa, synthetic construct
  source 1..9: note = Seed: VVVGAGDVG (KRAS G13D)
IVVSAVDVN

SEQ ID NO: 89099 - protein, 9 aa, synthetic construct
  source 1..9: note = Seed: VVVGAGDVG (KRAS G13D)
IVVSAVDVQ

SEQ ID NO: 89100 - protein, 9 aa, synthetic construct
  source 1..9: note = Seed: VVVGAGDVG (KRAS G13D)
IVVSAVDVS

SEQ ID NO: 89101 - protein, 9 aa, synthetic construct
  source 1..9: note = Seed: VVVGAGDVG (KRAS G13D)
IVVSAVDVT

SEQ ID NO: 89102 - protein, 9 aa, synthetic construct
  source 1..9: note = Seed: VVVGAGDVG (KRAS G13D)
IVVSAVDVV

SEQ ID NO: 89103 - protein, 9 aa, synthetic construct
  source 1..9: note = Seed: VVVGAGDVG (KRAS G13D)
IVVSAVDVY

SEQ ID NO: 89104 - protein, 9 aa, synthetic construct
  source 1..9: note = Seed: VVVGAGDVG (KRAS G13D)
IVVTAADVA

SEQ ID NO: 89105 - protein, 9 aa, synthetic construct
  source 1..9: note = Seed: VVVGAGDVG (KRAS G13D)
IVVTAADVD

SEQ ID NO: 89106 - protein, 9 aa, synthetic construct
  source 1..9: note = Seed: VVVGAGDVG (KRAS G13D)
IVVTAADVE

SEQ ID NO: 89107 - protein, 9 aa, synthetic construct
  source 1..9: note = Seed: VVVGAGDVG (KRAS G13D)
IVVTAADVG

SEQ ID NO: 89108 - protein, 9 aa, synthetic construct
  source 1..9: note = Seed: VVVGAGDVG (KRAS G13D)
IVVTAADVH

SEQ ID NO: 89109 - protein, 9 aa, synthetic construct
  source 1..9: note = Seed: VVVGAGDVG (KRAS G13D)
IVVTAADVI

SEQ ID NO: 89110 - protein, 9 aa, synthetic construct
  source 1..9: note = Seed: VVVGAGDVG (KRAS G13D)
IVVTAADVL

SEQ ID NO: 89111 - protein, 9 aa, synthetic construct
  source 1..9: note = Seed: VVVGAGDVG (KRAS G13D)
IVVTAADVM

SEQ ID NO: 89112 - protein, 9 aa, synthetic construct
  source 1..9: note = Seed: VVVGAGDVG (KRAS G13D)
IVVTAADVN

SEQ ID NO: 89113 - protein, 9 aa, synthetic construct
  source 1..9: note = Seed: VVVGAGDVG (KRAS G13D)
IVVTAADVQ

SEQ ID NO: 89114 - protein, 9 aa, synthetic construct
  source 1..9: note = Seed: VVVGAGDVG (KRAS G13D)
IVVTAADVS

SEQ ID NO: 89115 - protein, 9 aa, synthetic construct
  source 1..9: note = Seed: VVVGAGDVG (KRAS G13D)
IVVTAADVT

SEQ ID NO: 89116 - protein, 9 aa, synthetic construct
  source 1..9: note = Seed: VVVGAGDVG (KRAS G13D)
IVVTAADVV

SEQ ID NO: 89117 - protein, 9 aa, synthetic construct
  source 1..9: note = Seed: VVVGAGDVG (KRAS G13D)
IVVTADDVL

SEQ ID NO: 89118 - protein, 9 aa, synthetic construct
  source 1..9: note = Seed: VVVGAGDVG (KRAS G13D)
IVVTAGDVA

SEQ ID NO: 89119 - protein, 9 aa, synthetic construct
  source 1..9: note = Seed: VVVGAGDVG (KRAS G13D)
IVVTAGDVH

SEQ ID NO: 89120 - protein, 9 aa, synthetic construct
  source 1..9: note = Seed: VVVGAGDVG (KRAS G13D)
IVVTAGDVN

SEQ ID NO: 89121 - protein, 9 aa, synthetic construct
  source 1..9: note = Seed: VVVGAGDVG (KRAS G13D)
IVVTAGDVS

SEQ ID NO: 89122 - protein, 9 aa, synthetic construct
  source 1..9: note = Seed: VVVGAGDVG (KRAS G13D)
IVVTAIDVA

SEQ ID NO: 89123 - protein, 9 aa, synthetic construct
  source 1..9: note = Seed: VVVGAGDVG (KRAS G13D)
IVVTAIDVM

SEQ ID NO: 89124 - protein, 9 aa, synthetic construct
  source 1..9: note = Seed: VVVGAGDVG (KRAS G13D)
IVVTAIDVS

SEQ ID NO: 89125 - protein, 9 aa, synthetic construct
  source 1..9: note = Seed: VVVGAGDVG (KRAS G13D)
IVVTANDVA

SEQ ID NO: 89126 - protein, 9 aa, synthetic construct
  source 1..9: note = Seed: VVVGAGDVG (KRAS G13D)
IVVTANDVC

SEQ ID NO: 89127 - protein, 9 aa, synthetic construct
  source 1..9: note = Seed: VVVGAGDVG (KRAS G13D)
IVVTANDVF

SEQ ID NO: 89128 - protein, 9 aa, synthetic construct
  source 1..9: note = Seed: VVVGAGDVG (KRAS G13D)
IVVTANDVG

SEQ ID NO: 89129 - protein, 9 aa, synthetic construct
  source 1..9: note = Seed: VVVGAGDVG (KRAS G13D)
IVVTANDVH

SEQ ID NO: 89130 - protein, 9 aa, synthetic construct
  source 1..9: note = Seed: VVVGAGDVG (KRAS G13D)
IVVTANDVI

SEQ ID NO: 89131 - protein, 9 aa, synthetic construct
  source 1..9: note = Seed: VVVGAGDVG (KRAS G13D)
IVVTANDVL

SEQ ID NO: 89132 - protein, 9 aa, synthetic construct
  source 1..9: note = Seed: VVVGAGDVG (KRAS G13D)
IVVTANDVM

SEQ ID NO: 89133 - protein, 9 aa, synthetic construct
  source 1..9: note = Seed: VVVGAGDVG (KRAS G13D)
IVVTANDVN

SEQ ID NO: 89134 - protein, 9 aa, synthetic construct
  source 1..9: note = Seed: VVVGAGDVG (KRAS G13D)
IVVTANDVQ

SEQ ID NO: 89135 - protein, 9 aa, synthetic construct
  source 1..9: note = Seed: VVVGAGDVG (KRAS G13D)
IVVTANDVS

SEQ ID NO: 89136 - protein, 9 aa, synthetic construct
  source 1..9: note = Seed: VVVGAGDVG (KRAS G13D)
IVVTANDVT

SEQ ID NO: 89137 - protein, 9 aa, synthetic construct
  source 1..9: note = Seed: VVVGAGDVG (KRAS G13D)
IVVTANDVV

SEQ ID NO: 89138 - protein, 9 aa, synthetic construct
  source 1..9: note = Seed: VVVGAGDVG (KRAS G13D)
IVVTAPDVA

SEQ ID NO: 89139 - protein, 9 aa, synthetic construct
  source 1..9: note = Seed: VVVGAGDVG (KRAS G13D)
IVVTAPDVG

SEQ ID NO: 89140 - protein, 9 aa, synthetic construct
  source 1..9: note = Seed: VVVGAGDVG (KRAS G13D)
IVVTAPDVH

SEQ ID NO: 89141 - protein, 9 aa, synthetic construct
  source 1..9: note = Seed: VVVGAGDVG (KRAS G13D)
IVVTAPDVI

SEQ ID NO: 89142 - protein, 9 aa, synthetic construct
  source 1..9: note = Seed: VVVGAGDVG (KRAS G13D)
IVVTAPDVL

SEQ ID NO: 89143 - protein, 9 aa, synthetic construct
  source 1..9: note = Seed: VVVGAGDVG (KRAS G13D)
IVVTAPDVM

SEQ ID NO: 89144 - protein, 9 aa, synthetic construct
  source 1..9: note = Seed: VVVGAGDVG (KRAS G13D)
IVVTAPDVN

SEQ ID NO: 89145 - protein, 9 aa, synthetic construct
  source 1..9: note = Seed: VVVGAGDVG (KRAS G13D)
IVVTAPDVQ

SEQ ID NO: 89146 - protein, 9 aa, synthetic construct
  source 1..9: note = Seed: VVVGAGDVG (KRAS G13D)
IVVTAPDVS

SEQ ID NO: 89147 - protein, 9 aa, synthetic construct
  source 1..9: note = Seed: VVVGAGDVG (KRAS G13D)
IVVTAPDVT

SEQ ID NO: 89148 - protein, 9 aa, synthetic construct
  source 1..9: note = Seed: VVVGAGDVG (KRAS G13D)
IVVTAPDVV

SEQ ID NO: 89149 - protein, 9 aa, synthetic construct
  source 1..9: note = Seed: VVVGAGDVG (KRAS G13D)
IVVTASDVA

SEQ ID NO: 89150 - protein, 9 aa, synthetic construct
  source 1..9: note = Seed: VVVGAGDVG (KRAS G13D)
IVVTASDVD

SEQ ID NO: 89151 - protein, 9 aa, synthetic construct
  source 1..9: note = Seed: VVVGAGDVG (KRAS G13D)
IVVTASDVG

SEQ ID NO: 89152 - protein, 9 aa, synthetic construct
  source 1..9: note = Seed: VVVGAGDVG (KRAS G13D)
IVVTASDVH

SEQ ID NO: 89153 - protein, 9 aa, synthetic construct
  source 1..9: note = Seed: VVVGAGDVG (KRAS G13D)
IVVTASDVI

SEQ ID NO: 89154 - protein, 9 aa, synthetic construct
  source 1..9: note = Seed: VVVGAGDVG (KRAS G13D)
IVVTASDVL

SEQ ID NO: 89155 - protein, 9 aa, synthetic construct
  source 1..9: note = Seed: VVVGAGDVG (KRAS G13D)
IVVTASDVM

SEQ ID NO: 89156 - protein, 9 aa, synthetic construct
  source 1..9: note = Seed: VVVGAGDVG (KRAS G13D)
IVVTASDVN

SEQ ID NO: 89157 - protein, 9 aa, synthetic construct
  source 1..9: note = Seed: VVVGAGDVG (KRAS G13D)
IVVTASDVQ

SEQ ID NO: 89158 - protein, 9 aa, synthetic construct
  source 1..9: note = Seed: VVVGAGDVG (KRAS G13D)
IVVTASDVS

SEQ ID NO: 89159 - protein, 9 aa, synthetic construct
  source 1..9: note = Seed: VVVGAGDVG (KRAS G13D)
IVVTASDVT

SEQ ID NO: 89160 - protein, 9 aa, synthetic construct
  source 1..9: note = Seed: VVVGAGDVG (KRAS G13D)
IVVTASDVV

SEQ ID NO: 89161 - protein, 9 aa, synthetic construct
  source 1..9: note = Seed: VVVGAGDVG (KRAS G13D)
IVVTATDVA

SEQ ID NO: 89162 - protein, 9 aa, synthetic construct
  source 1..9: note = Seed: VVVGAGDVG (KRAS G13D)
IVVTATDVE

SEQ ID NO: 89163 - protein, 9 aa, synthetic construct
  source 1..9: note = Seed: VVVGAGDVG (KRAS G13D)
IVVTATDVG

SEQ ID NO: 89164 - protein, 9 aa, synthetic construct
  source 1..9: note = Seed: VVVGAGDVG (KRAS G13D)
IVVTATDVH

SEQ ID NO: 89165 - protein, 9 aa, synthetic construct
  source 1..9: note = Seed: VVVGAGDVG (KRAS G13D)
IVVTATDVI

SEQ ID NO: 89166 - protein, 9 aa, synthetic construct
  source 1..9: note = Seed: VVVGAGDVG (KRAS G13D)
IVVTATDVL

SEQ ID NO: 89167 - protein, 9 aa, synthetic construct
  source 1..9: note = Seed: VVVGAGDVG (KRAS G13D)
IVVTATDVM

SEQ ID NO: 89168 - protein, 9 aa, synthetic construct
  source 1..9: note = Seed: VVVGAGDVG (KRAS G13D)
IVVTATDVN

SEQ ID NO: 89169 - protein, 9 aa, synthetic construct
  source 1..9: note = Seed: VVVGAGDVG (KRAS G13D)
IVVTATDVQ

SEQ ID NO: 89170 - protein, 9 aa, synthetic construct
  source 1..9: note = Seed: VVVGAGDVG (KRAS G13D)
IVVTATDVS

SEQ ID NO: 89171 - protein, 9 aa, synthetic construct
  source 1..9: note = Seed: VVVGAGDVG (KRAS G13D)
IVVTATDVT

SEQ ID NO: 89172 - protein, 9 aa, synthetic construct
  source 1..9: note = Seed: VVVGAGDVG (KRAS G13D)
IVVTATDVV

SEQ ID NO: 89173 - protein, 9 aa, synthetic construct
  source 1..9: note = Seed: VVVGAGDVG (KRAS G13D)
IVVTAVDVA

SEQ ID NO: 89174 - protein, 9 aa, synthetic construct
  source 1..9: note = Seed: VVVGAGDVG (KRAS G13D)
IVVTAVDVH

SEQ ID NO: 89175 - protein, 9 aa, synthetic construct
  source 1..9: note = Seed: VVVGAGDVG (KRAS G13D)
IVVTAVDVN

SEQ ID NO: 89176 - protein, 9 aa, synthetic construct
  source 1..9: note = Seed: VVVGAGDVG (KRAS G13D)
IVVTAVDVQ

SEQ ID NO: 89177 - protein, 9 aa, synthetic construct
  source 1..9: note = Seed: VVVGAGDVG (KRAS G13D)
IVVTAVDVS

SEQ ID NO: 89178 - protein, 9 aa, synthetic construct
  source 1..9: note = Seed: VVVGAGDVG (KRAS G13D)
IVVVAADVA

SEQ ID NO: 89179 - protein, 9 aa, synthetic construct
  source 1..9: note = Seed: VVVGAGDVG (KRAS G13D)
IVVVAADVH

SEQ ID NO: 89180 - protein, 9 aa, synthetic construct
  source 1..9: note = Seed: VVVGAGDVG (KRAS G13D)
IVVVAADVM

SEQ ID NO: 89181 - protein, 9 aa, synthetic construct
  source 1..9: note = Seed: VVVGAGDVG (KRAS G13D)
IVVVAADVN

SEQ ID NO: 89182 - protein, 9 aa, synthetic construct
  source 1..9: note = Seed: VVVGAGDVG (KRAS G13D)
IVVVAADVQ

SEQ ID NO: 89183 - protein, 9 aa, synthetic construct
  source 1..9: note = Seed: VVVGAGDVG (KRAS G13D)
IVVVAADVS

SEQ ID NO: 89184 - protein, 9 aa, synthetic construct
  source 1..9: note = Seed: VVVGAGDVG (KRAS G13D)
IVVVAADVT

SEQ ID NO: 89185 - protein, 9 aa, synthetic construct
  source 1..9: note = Seed: VVVGAGDVG (KRAS G13D)
IVVVAADVV

SEQ ID NO: 89186 - protein, 9 aa, synthetic construct
  source 1..9: note = Seed: VVVGAGDVG (KRAS G13D)
IVVVADDVA

SEQ ID NO: 89187 - protein, 9 aa, synthetic construct
  source 1..9: note = Seed: VVVGAGDVG (KRAS G13D)
IVVVADDVS

SEQ ID NO: 89188 - protein, 9 aa, synthetic construct
  source 1..9: note = Seed: VVVGAGDVG (KRAS G13D)
IVVVAGDVA

SEQ ID NO: 89189 - protein, 9 aa, synthetic construct
  source 1..9: note = Seed: VVVGAGDVG (KRAS G13D)
IVVVAIDVQ

SEQ ID NO: 89190 - protein, 9 aa, synthetic construct
  source 1..9: note = Seed: VVVGAGDVG (KRAS G13D)
IVVVAIDVS

SEQ ID NO: 89191 - protein, 9 aa, synthetic construct
  source 1..9: note = Seed: VVVGAGDVG (KRAS G13D)
IVVVANDVA

SEQ ID NO: 89192 - protein, 9 aa, synthetic construct
  source 1..9: note = Seed: VVVGAGDVG (KRAS G13D)
IVVVANDVD

SEQ ID NO: 89193 - protein, 9 aa, synthetic construct
  source 1..9: note = Seed: VVVGAGDVG (KRAS G13D)
IVVVANDVE

SEQ ID NO: 89194 - protein, 9 aa, synthetic construct
  source 1..9: note = Seed: VVVGAGDVG (KRAS G13D)
IVVVANDVG

SEQ ID NO: 89195 - protein, 9 aa, synthetic construct
  source 1..9: note = Seed: VVVGAGDVG (KRAS G13D)
IVVVANDVH

SEQ ID NO: 89196 - protein, 9 aa, synthetic construct
  source 1..9: note = Seed: VVVGAGDVG (KRAS G13D)
IVVVANDVI

SEQ ID NO: 89197 - protein, 9 aa, synthetic construct
  source 1..9: note = Seed: VVVGAGDVG (KRAS G13D)
IVVVANDVL

SEQ ID NO: 89198 - protein, 9 aa, synthetic construct
  source 1..9: note = Seed: VVVGAGDVG (KRAS G13D)
IVVVANDVM

SEQ ID NO: 89199 - protein, 9 aa, synthetic construct
  source 1..9: note = Seed: VVVGAGDVG (KRAS G13D)
IVVVANDVN

SEQ ID NO: 89200 - protein, 9 aa, synthetic construct
  source 1..9: note = Seed: VVVGAGDVG (KRAS G13D)
IVVVANDVP

SEQ ID NO: 89201 - protein, 9 aa, synthetic construct
  source 1..9: note = Seed: VVVGAGDVG (KRAS G13D)
IVVVANDVQ

SEQ ID NO: 89202 - protein, 9 aa, synthetic construct
  source 1..9: note = Seed: VVVGAGDVG (KRAS G13D)
IVVVANDVS

SEQ ID NO: 89203 - protein, 9 aa, synthetic construct
  source 1..9: note = Seed: VVVGAGDVG (KRAS G13D)
IVVVANDVT

SEQ ID NO: 89204 - protein, 9 aa, synthetic construct
  source 1..9: note = Seed: VVVGAGDVG (KRAS G13D)
IVVVANDVV

SEQ ID NO: 89205 - protein, 9 aa, synthetic construct
  source 1..9: note = Seed: VVVGAGDVG (KRAS G13D)
IVVVANDVY

SEQ ID NO: 89206 - protein, 9 aa, synthetic construct
  source 1..9: note = Seed: VVVGAGDVG (KRAS G13D)
IVVVAPDVA

SEQ ID NO: 89207 - protein, 9 aa, synthetic construct
  source 1..9: note = Seed: VVVGAGDVG (KRAS G13D)
IVVVAPDVH

SEQ ID NO: 89208 - protein, 9 aa, synthetic construct
  source 1..9: note = Seed: VVVGAGDVG (KRAS G13D)
IVVVAPDVI

SEQ ID NO: 89209 - protein, 9 aa, synthetic construct
  source 1..9: note = Seed: VVVGAGDVG (KRAS G13D)
IVVVAPDVL

SEQ ID NO: 89210 - protein, 9 aa, synthetic construct
  source 1..9: note = Seed: VVVGAGDVG (KRAS G13D)
IVVVAPDVM

SEQ ID NO: 89211 - protein, 9 aa, synthetic construct
  source 1..9: note = Seed: VVVGAGDVG (KRAS G13D)
IVVVAPDVN

SEQ ID NO: 89212 - protein, 9 aa, synthetic construct
  source 1..9: note = Seed: VVVGAGDVG (KRAS G13D)
IVVVAPDVQ

SEQ ID NO: 89213 - protein, 9 aa, synthetic construct
  source 1..9: note = Seed: VVVGAGDVG (KRAS G13D)
IVVVAPDVS

SEQ ID NO: 89214 - protein, 9 aa, synthetic construct
  source 1..9: note = Seed: VVVGAGDVG (KRAS G13D)
IVVVAPDVT

SEQ ID NO: 89215 - protein, 9 aa, synthetic construct
  source 1..9: note = Seed: VVVGAGDVG (KRAS G13D)
IVVVAPDVV

SEQ ID NO: 89216 - protein, 9 aa, synthetic construct
  source 1..9: note = Seed: VVVGAGDVG (KRAS G13D)
IVVVAPDVY

SEQ ID NO: 89217 - protein, 9 aa, synthetic construct
  source 1..9: note = Seed: VVVGAGDVG (KRAS G13D)
IVVVASDVA

SEQ ID NO: 89218 - protein, 9 aa, synthetic construct
  source 1..9: note = Seed: VVVGAGDVG (KRAS G13D)
IVVVASDVG

SEQ ID NO: 89219 - protein, 9 aa, synthetic construct
  source 1..9: note = Seed: VVVGAGDVG (KRAS G13D)
IVVVASDVH

SEQ ID NO: 89220 - protein, 9 aa, synthetic construct
  source 1..9: note = Seed: VVVGAGDVG (KRAS G13D)
IVVVASDVL

SEQ ID NO: 89221 - protein, 9 aa, synthetic construct
  source 1..9: note = Seed: VVVGAGDVG (KRAS G13D)
IVVVASDVM

SEQ ID NO: 89222 - protein, 9 aa, synthetic construct
  source 1..9: note = Seed: VVVGAGDVG (KRAS G13D)
IVVVASDVN

SEQ ID NO: 89223 - protein, 9 aa, synthetic construct
  source 1..9: note = Seed: VVVGAGDVG (KRAS G13D)
IVVVASDVQ

SEQ ID NO: 89224 - protein, 9 aa, synthetic construct
  source 1..9: note = Seed: VVVGAGDVG (KRAS G13D)
IVVVASDVS

SEQ ID NO: 89225 - protein, 9 aa, synthetic construct
  source 1..9: note = Seed: VVVGAGDVG (KRAS G13D)
IVVVASDVT

SEQ ID NO: 89226 - protein, 9 aa, synthetic construct
  source 1..9: note = Seed: VVVGAGDVG (KRAS G13D)
IVVVASDVV

SEQ ID NO: 89227 - protein, 9 aa, synthetic construct
  source 1..9: note = Seed: VVVGAGDVG (KRAS G13D)
IVVVATDVA

SEQ ID NO: 89228 - protein, 9 aa, synthetic construct
  source 1..9: note = Seed: VVVGAGDVG (KRAS G13D)
IVVVATDVG

SEQ ID NO: 89229 - protein, 9 aa, synthetic construct
  source 1..9: note = Seed: VVVGAGDVG (KRAS G13D)
IVVVATDVH

SEQ ID NO: 89230 - protein, 9 aa, synthetic construct
  source 1..9: note = Seed: VVVGAGDVG (KRAS G13D)
IVVVATDVM

SEQ ID NO: 89231 - protein, 9 aa, synthetic construct
  source 1..9: note = Seed: VVVGAGDVG (KRAS G13D)
IVVVATDVN

SEQ ID NO: 89232 - protein, 9 aa, synthetic construct
  source 1..9: note = Seed: VVVGAGDVG (KRAS G13D)
IVVVATDVQ

SEQ ID NO: 89233 - protein, 9 aa, synthetic construct
  source 1..9: note = Seed: VVVGAGDVG (KRAS G13D)
IVVVATDVS

SEQ ID NO: 89234 - protein, 9 aa, synthetic construct
  source 1..9: note = Seed: VVVGAGDVG (KRAS G13D)
IVVVATDVT

SEQ ID NO: 89235 - protein, 9 aa, synthetic construct
  source 1..9: note = Seed: VVVGAGDVG (KRAS G13D)
IVVVAVDVA

SEQ ID NO: 89236 - protein, 9 aa, synthetic construct
  source 1..9: note = Seed: VVVGAGDVG (KRAS G13D)
IVVVAVDVH

SEQ ID NO: 89237 - protein, 9 aa, synthetic construct
  source 1..9: note = Seed: VVVGAGDVG (KRAS G13D)
IVVVAVDVS

SEQ ID NO: 89238 - protein, 9 aa, synthetic construct
  source 1..9: note = Seed: VVVGAGDVG (KRAS G13D)
IVVWAADVA

SEQ ID NO: 89239 - protein, 9 aa, synthetic construct
  source 1..9: note = Seed: VVVGAGDVG (KRAS G13D)
IVVWAADVD

SEQ ID NO: 89240 - protein, 9 aa, synthetic construct
  source 1..9: note = Seed: VVVGAGDVG (KRAS G13D)
IVVWAADVE

SEQ ID NO: 89241 - protein, 9 aa, synthetic construct
  source 1..9: note = Seed: VVVGAGDVG (KRAS G13D)
IVVWAADVF

SEQ ID NO: 89242 - protein, 9 aa, synthetic construct
  source 1..9: note = Seed: VVVGAGDVG (KRAS G13D)
IVVWAADVG

SEQ ID NO: 89243 - protein, 9 aa, synthetic construct
  source 1..9: note = Seed: VVVGAGDVG (KRAS G13D)
IVVWAADVH

SEQ ID NO: 89244 - protein, 9 aa, synthetic construct
  source 1..9: note = Seed: VVVGAGDVG (KRAS G13D)
IVVWAADVI

SEQ ID NO: 89245 - protein, 9 aa, synthetic construct
  source 1..9: note = Seed: VVVGAGDVG (KRAS G13D)
IVVWAADVL

SEQ ID NO: 89246 - protein, 9 aa, synthetic construct
  source 1..9: note = Seed: VVVGAGDVG (KRAS G13D)
IVVWAADVM

SEQ ID NO: 89247 - protein, 9 aa, synthetic construct
  source 1..9: note = Seed: VVVGAGDVG (KRAS G13D)
IVVWAADVN

SEQ ID NO: 89248 - protein, 9 aa, synthetic construct
  source 1..9: note = Seed: VVVGAGDVG (KRAS G13D)
IVVWAADVP

SEQ ID NO: 89249 - protein, 9 aa, synthetic construct
  source 1..9: note = Seed: VVVGAGDVG (KRAS G13D)
IVVWAADVQ

SEQ ID NO: 89250 - protein, 9 aa, synthetic construct
  source 1..9: note = Seed: VVVGAGDVG (KRAS G13D)
IVVWAADVR

SEQ ID NO: 89251 - protein, 9 aa, synthetic construct
  source 1..9: note = Seed: VVVGAGDVG (KRAS G13D)
IVVWAADVS

SEQ ID NO: 89252 - protein, 9 aa, synthetic construct
  source 1..9: note = Seed: VVVGAGDVG (KRAS G13D)
IVVWAADVT

SEQ ID NO: 89253 - protein, 9 aa, synthetic construct
  source 1..9: note = Seed: VVVGAGDVG (KRAS G13D)
IVVWAADVV

SEQ ID NO: 89254 - protein, 9 aa, synthetic construct
  source 1..9: note = Seed: VVVGAGDVG (KRAS G13D)
IVVWAADVW

SEQ ID NO: 89255 - protein, 9 aa, synthetic construct
  source 1..9: note = Seed: VVVGAGDVG (KRAS G13D)
IVVWAADVY

SEQ ID NO: 89256 - protein, 9 aa, synthetic construct
  source 1..9: note = Seed: VVVGAGDVG (KRAS G13D)
IVVWADDVA

SEQ ID NO: 89257 - protein, 9 aa, synthetic construct
  source 1..9: note = Seed: VVVGAGDVG (KRAS G13D)
IVVWADDVC

SEQ ID NO: 89258 - protein, 9 aa, synthetic construct
  source 1..9: note = Seed: VVVGAGDVG (KRAS G13D)
IVVWADDVD

SEQ ID NO: 89259 - protein, 9 aa, synthetic construct
  source 1..9: note = Seed: VVVGAGDVG (KRAS G13D)
IVVWADDVE

SEQ ID NO: 89260 - protein, 9 aa, synthetic construct
  source 1..9: note = Seed: VVVGAGDVG (KRAS G13D)
IVVWADDVF

SEQ ID NO: 89261 - protein, 9 aa, synthetic construct
  source 1..9: note = Seed: VVVGAGDVG (KRAS G13D)
IVVWADDVG

SEQ ID NO: 89262 - protein, 9 aa, synthetic construct
  source 1..9: note = Seed: VVVGAGDVG (KRAS G13D)
IVVWADDVH

SEQ ID NO: 89263 - protein, 9 aa, synthetic construct
  source 1..9: note = Seed: VVVGAGDVG (KRAS G13D)
IVVWADDVI

SEQ ID NO: 89264 - protein, 9 aa, synthetic construct
  source 1..9: note = Seed: VVVGAGDVG (KRAS G13D)
IVVWADDVK

SEQ ID NO: 89265 - protein, 9 aa, synthetic construct
  source 1..9: note = Seed: VVVGAGDVG (KRAS G13D)
IVVWADDVL

SEQ ID NO: 89266 - protein, 9 aa, synthetic construct
  source 1..9: note = Seed: VVVGAGDVG (KRAS G13D)
IVVWADDVM

SEQ ID NO: 89267 - protein, 9 aa, synthetic construct
  source 1..9: note = Seed: VVVGAGDVG (KRAS G13D)
IVVWADDVN

SEQ ID NO: 89268 - protein, 9 aa, synthetic construct
  source 1..9: note = Seed: VVVGAGDVG (KRAS G13D)
IVVWADDVP

SEQ ID NO: 89269 - protein, 9 aa, synthetic construct
  source 1..9: note = Seed: VVVGAGDVG (KRAS G13D)
IVVWADDVQ

SEQ ID NO: 89270 - protein, 9 aa, synthetic construct
  source 1..9: note = Seed: VVVGAGDVG (KRAS G13D)
IVVWADDVR

SEQ ID NO: 89271 - protein, 9 aa, synthetic construct
  source 1..9: note = Seed: VVVGAGDVG (KRAS G13D)
IVVWADDVS

SEQ ID NO: 89272 - protein, 9 aa, synthetic construct
  source 1..9: note = Seed: VVVGAGDVG (KRAS G13D)
IVVWADDVT

SEQ ID NO: 89273 - protein, 9 aa, synthetic construct
  source 1..9: note = Seed: VVVGAGDVG (KRAS G13D)
IVVWADDVV

SEQ ID NO: 89274 - protein, 9 aa, synthetic construct
  source 1..9: note = Seed: VVVGAGDVG (KRAS G13D)
IVVWADDVW

SEQ ID NO: 89275 - protein, 9 aa, synthetic construct
  source 1..9: note = Seed: VVVGAGDVG (KRAS G13D)
IVVWADDVY

SEQ ID NO: 89276 - protein, 9 aa, synthetic construct
  source 1..9: note = Seed: VVVGAGDVG (KRAS G13D)
IVVWAEDVA

SEQ ID NO: 89277 - protein, 9 aa, synthetic construct
  source 1..9: note = Seed: VVVGAGDVG (KRAS G13D)
IVVWAEDVF

SEQ ID NO: 89278 - protein, 9 aa, synthetic construct
  source 1..9: note = Seed: VVVGAGDVG (KRAS G13D)
IVVWAEDVH

SEQ ID NO: 89279 - protein, 9 aa, synthetic construct
  source 1..9: note = Seed: VVVGAGDVG (KRAS G13D)
IVVWAEDVI

SEQ ID NO: 89280 - protein, 9 aa, synthetic construct
  source 1..9: note = Seed: VVVGAGDVG (KRAS G13D)
IVVWAEDVL

SEQ ID NO: 89281 - protein, 9 aa, synthetic construct
  source 1..9: note = Seed: VVVGAGDVG (KRAS G13D)
IVVWAEDVM

SEQ ID NO: 89282 - protein, 9 aa, synthetic construct
  source 1..9: note = Seed: VVVGAGDVG (KRAS G13D)
IVVWAEDVP

SEQ ID NO: 89283 - protein, 9 aa, synthetic construct
  source 1..9: note = Seed: VVVGAGDVG (KRAS G13D)
IVVWAEDVQ

SEQ ID NO: 89284 - protein, 9 aa, synthetic construct
  source 1..9: note = Seed: VVVGAGDVG (KRAS G13D)
IVVWAEDVR

SEQ ID NO: 89285 - protein, 9 aa, synthetic construct
  source 1..9: note = Seed: VVVGAGDVG (KRAS G13D)
IVVWAEDVS

SEQ ID NO: 89286 - protein, 9 aa, synthetic construct
  source 1..9: note = Seed: VVVGAGDVG (KRAS G13D)
IVVWAEDVV

SEQ ID NO: 89287 - protein, 9 aa, synthetic construct
  source 1..9: note = Seed: VVVGAGDVG (KRAS G13D)
IVVWAEDVW

SEQ ID NO: 89288 - protein, 9 aa, synthetic construct
  source 1..9: note = Seed: VVVGAGDVG (KRAS G13D)
IVVWAEDVY

SEQ ID NO: 89289 - protein, 9 aa, synthetic construct
  source 1..9: note = Seed: VVVGAGDVG (KRAS G13D)
IVVWAFDVS

SEQ ID NO: 89290 - protein, 9 aa, synthetic construct
  source 1..9: note = Seed: VVVGAGDVG (KRAS G13D)
IVVWAGDVA

SEQ ID NO: 89291 - protein, 9 aa, synthetic construct
  source 1..9: note = Seed: VVVGAGDVG (KRAS G13D)
IVVWAGDVF

SEQ ID NO: 89292 - protein, 9 aa, synthetic construct
  source 1..9: note = Seed: VVVGAGDVG (KRAS G13D)
IVVWAGDVI

SEQ ID NO: 89293 - protein, 9 aa, synthetic construct
  source 1..9: note = Seed: VVVGAGDVG (KRAS G13D)
IVVWAGDVL

SEQ ID NO: 89294 - protein, 9 aa, synthetic construct
  source 1..9: note = Seed: VVVGAGDVG (KRAS G13D)
IVVWAGDVM

SEQ ID NO: 89295 - protein, 9 aa, synthetic construct
  source 1..9: note = Seed: VVVGAGDVG (KRAS G13D)
IVVWAGDVS

SEQ ID NO: 89296 - protein, 9 aa, synthetic construct
  source 1..9: note = Seed: VVVGAGDVG (KRAS G13D)
IVVWAGDVV

SEQ ID NO: 89297 - protein, 9 aa, synthetic construct
  source 1..9: note = Seed: VVVGAGDVG (KRAS G13D)
IVVWAGDVY

SEQ ID NO: 89298 - protein, 9 aa, synthetic construct
  source 1..9: note = Seed: VVVGAGDVG (KRAS G13D)
IVVWAHDVA

SEQ ID NO: 89299 - protein, 9 aa, synthetic construct
  source 1..9: note = Seed: VVVGAGDVG (KRAS G13D)
IVVWAHDVE

SEQ ID NO: 89300 - protein, 9 aa, synthetic construct
  source 1..9: note = Seed: VVVGAGDVG (KRAS G13D)
IVVWAHDVF

SEQ ID NO: 89301 - protein, 9 aa, synthetic construct
  source 1..9: note = Seed: VVVGAGDVG (KRAS G13D)
IVVWAHDVI

SEQ ID NO: 89302 - protein, 9 aa, synthetic construct
  source 1..9: note = Seed: VVVGAGDVG (KRAS G13D)
IVVWAHDVL

SEQ ID NO: 89303 - protein, 9 aa, synthetic construct
  source 1..9: note = Seed: VVVGAGDVG (KRAS G13D)
IVVWAHDVM

SEQ ID NO: 89304 - protein, 9 aa, synthetic construct
  source 1..9: note = Seed: VVVGAGDVG (KRAS G13D)
IVVWAHDVN

SEQ ID NO: 89305 - protein, 9 aa, synthetic construct
  source 1..9: note = Seed: VVVGAGDVG (KRAS G13D)
IVVWAHDVQ

SEQ ID NO: 89306 - protein, 9 aa, synthetic construct
  source 1..9: note = Seed: VVVGAGDVG (KRAS G13D)
IVVWAHDVS

SEQ ID NO: 89307 - protein, 9 aa, synthetic construct
  source 1..9: note = Seed: VVVGAGDVG (KRAS G13D)
IVVWAHDVT

SEQ ID NO: 89308 - protein, 9 aa, synthetic construct
  source 1..9: note = Seed: VVVGAGDVG (KRAS G13D)
IVVWAHDVV

SEQ ID NO: 89309 - protein, 9 aa, synthetic construct
  source 1..9: note = Seed: VVVGAGDVG (KRAS G13D)
IVVWAHDVY

SEQ ID NO: 89310 - protein, 9 aa, synthetic construct
  source 1..9: note = Seed: VVVGAGDVG (KRAS G13D)
IVVWAIDVA

SEQ ID NO: 89311 - protein, 9 aa, synthetic construct
  source 1..9: note = Seed: VVVGAGDVG (KRAS G13D)
IVVWAIDVD

SEQ ID NO: 89312 - protein, 9 aa, synthetic construct
  source 1..9: note = Seed: VVVGAGDVG (KRAS G13D)
IVVWAIDVE

SEQ ID NO: 89313 - protein, 9 aa, synthetic construct
  source 1..9: note = Seed: VVVGAGDVG (KRAS G13D)
IVVWAIDVF

SEQ ID NO: 89314 - protein, 9 aa, synthetic construct
  source 1..9: note = Seed: VVVGAGDVG (KRAS G13D)
IVVWAIDVG

SEQ ID NO: 89315 - protein, 9 aa, synthetic construct
  source 1..9: note = Seed: VVVGAGDVG (KRAS G13D)
IVVWAIDVH

SEQ ID NO: 89316 - protein, 9 aa, synthetic construct
  source 1..9: note = Seed: VVVGAGDVG (KRAS G13D)
IVVWAIDVI

SEQ ID NO: 89317 - protein, 9 aa, synthetic construct
  source 1..9: note = Seed: VVVGAGDVG (KRAS G13D)
IVVWAIDVL

SEQ ID NO: 89318 - protein, 9 aa, synthetic construct
  source 1..9: note = Seed: VVVGAGDVG (KRAS G13D)
IVVWAIDVM

SEQ ID NO: 89319 - protein, 9 aa, synthetic construct
  source 1..9: note = Seed: VVVGAGDVG (KRAS G13D)
IVVWAIDVN

SEQ ID NO: 89320 - protein, 9 aa, synthetic construct
  source 1..9: note = Seed: VVVGAGDVG (KRAS G13D)
IVVWAIDVP

SEQ ID NO: 89321 - protein, 9 aa, synthetic construct
  source 1..9: note = Seed: VVVGAGDVG (KRAS G13D)
IVVWAIDVQ

SEQ ID NO: 89322 - protein, 9 aa, synthetic construct
  source 1..9: note = Seed: VVVGAGDVG (KRAS G13D)
IVVWAIDVR

SEQ ID NO: 89323 - protein, 9 aa, synthetic construct
  source 1..9: note = Seed: VVVGAGDVG (KRAS G13D)
IVVWAIDVS

SEQ ID NO: 89324 - protein, 9 aa, synthetic construct
  source 1..9: note = Seed: VVVGAGDVG (KRAS G13D)
IVVWAIDVT

SEQ ID NO: 89325 - protein, 9 aa, synthetic construct
  source 1..9: note = Seed: VVVGAGDVG (KRAS G13D)
IVVWAIDVV

SEQ ID NO: 89326 - protein, 9 aa, synthetic construct
  source 1..9: note = Seed: VVVGAGDVG (KRAS G13D)
IVVWAIDVY

SEQ ID NO: 89327 - protein, 9 aa, synthetic construct
  source 1..9: note = Seed: VVVGAGDVG (KRAS G13D)
IVVWALDVA

SEQ ID NO: 89328 - protein, 9 aa, synthetic construct
  source 1..9: note = Seed: VVVGAGDVG (KRAS G13D)
IVVWALDVF

SEQ ID NO: 89329 - protein, 9 aa, synthetic construct
  source 1..9: note = Seed: VVVGAGDVG (KRAS G13D)
IVVWALDVH

SEQ ID NO: 89330 - protein, 9 aa, synthetic construct
  source 1..9: note = Seed: VVVGAGDVG (KRAS G13D)
IVVWALDVI

SEQ ID NO: 89331 - protein, 9 aa, synthetic construct
  source 1..9: note = Seed: VVVGAGDVG (KRAS G13D)
IVVWALDVL

SEQ ID NO: 89332 - protein, 9 aa, synthetic construct
  source 1..9: note = Seed: VVVGAGDVG (KRAS G13D)
IVVWALDVM

SEQ ID NO: 89333 - protein, 9 aa, synthetic construct
  source 1..9: note = Seed: VVVGAGDVG (KRAS G13D)
IVVWALDVN

SEQ ID NO: 89334 - protein, 9 aa, synthetic construct
  source 1..9: note = Seed: VVVGAGDVG (KRAS G13D)
IVVWALDVP

SEQ ID NO: 89335 - protein, 9 aa, synthetic construct
  source 1..9: note = Seed: VVVGAGDVG (KRAS G13D)
IVVWALDVQ

SEQ ID NO: 89336 - protein, 9 aa, synthetic construct
  source 1..9: note = Seed: VVVGAGDVG (KRAS G13D)
IVVWALDVS

SEQ ID NO: 89337 - protein, 9 aa, synthetic construct
  source 1..9: note = Seed: VVVGAGDVG (KRAS G13D)
IVVWALDVV

SEQ ID NO: 89338 - protein, 9 aa, synthetic construct
  source 1..9: note = Seed: VVVGAGDVG (KRAS G13D)
IVVWALDVY

SEQ ID NO: 89339 - protein, 9 aa, synthetic construct
  source 1..9: note = Seed: VVVGAGDVG (KRAS G13D)
IVVWAMDVA

SEQ ID NO: 89340 - protein, 9 aa, synthetic construct
  source 1..9: note = Seed: VVVGAGDVG (KRAS G13D)
IVVWAMDVD

SEQ ID NO: 89341 - protein, 9 aa, synthetic construct
  source 1..9: note = Seed: VVVGAGDVG (KRAS G13D)
IVVWAMDVE

SEQ ID NO: 89342 - protein, 9 aa, synthetic construct
  source 1..9: note = Seed: VVVGAGDVG (KRAS G13D)
IVVWAMDVF

SEQ ID NO: 89343 - protein, 9 aa, synthetic construct
  source 1..9: note = Seed: VVVGAGDVG (KRAS G13D)
IVVWAMDVH

SEQ ID NO: 89344 - protein, 9 aa, synthetic construct
  source 1..9: note = Seed: VVVGAGDVG (KRAS G13D)
IVVWAMDVI

SEQ ID NO: 89345 - protein, 9 aa, synthetic construct
  source 1..9: note = Seed: VVVGAGDVG (KRAS G13D)
IVVWAMDVL

SEQ ID NO: 89346 - protein, 9 aa, synthetic construct
  source 1..9: note = Seed: VVVGAGDVG (KRAS G13D)
IVVWAMDVM

SEQ ID NO: 89347 - protein, 9 aa, synthetic construct
  source 1..9: note = Seed: VVVGAGDVG (KRAS G13D)
IVVWAMDVN

SEQ ID NO: 89348 - protein, 9 aa, synthetic construct
  source 1..9: note = Seed: VVVGAGDVG (KRAS G13D)
IVVWAMDVP

SEQ ID NO: 89349 - protein, 9 aa, synthetic construct
  source 1..9: note = Seed: VVVGAGDVG (KRAS G13D)
IVVWAMDVQ

SEQ ID NO: 89350 - protein, 9 aa, synthetic construct
  source 1..9: note = Seed: VVVGAGDVG (KRAS G13D)
IVVWAMDVR

SEQ ID NO: 89351 - protein, 9 aa, synthetic construct
  source 1..9: note = Seed: VVVGAGDVG (KRAS G13D)
IVVWAMDVS

SEQ ID NO: 89352 - protein, 9 aa, synthetic construct
  source 1..9: note = Seed: VVVGAGDVG (KRAS G13D)
IVVWAMDVT

SEQ ID NO: 89353 - protein, 9 aa, synthetic construct
  source 1..9: note = Seed: VVVGAGDVG (KRAS G13D)
IVVWAMDVV

SEQ ID NO: 89354 - protein, 9 aa, synthetic construct
  source 1..9: note = Seed: VVVGAGDVG (KRAS G13D)
IVVWAMDVY

SEQ ID NO: 89355 - protein, 9 aa, synthetic construct
  source 1..9: note = Seed: VVVGAGDVG (KRAS G13D)
IVVWANDVA

SEQ ID NO: 89356 - protein, 9 aa, synthetic construct
  source 1..9: note = Seed: VVVGAGDVG (KRAS G13D)
IVVWANDVC

SEQ ID NO: 89357 - protein, 9 aa, synthetic construct
  source 1..9: note = Seed: VVVGAGDVG (KRAS G13D)
IVVWANDVD

SEQ ID NO: 89358 - protein, 9 aa, synthetic construct
  source 1..9: note = Seed: VVVGAGDVG (KRAS G13D)
IVVWANDVE

SEQ ID NO: 89359 - protein, 9 aa, synthetic construct
  source 1..9: note = Seed: VVVGAGDVG (KRAS G13D)
IVVWANDVF

SEQ ID NO: 89360 - protein, 9 aa, synthetic construct
  source 1..9: note = Seed: VVVGAGDVG (KRAS G13D)
IVVWANDVG

SEQ ID NO: 89361 - protein, 9 aa, synthetic construct
  source 1..9: note = Seed: VVVGAGDVG (KRAS G13D)
IVVWANDVH

SEQ ID NO: 89362 - protein, 9 aa, synthetic construct
  source 1..9: note = Seed: VVVGAGDVG (KRAS G13D)
IVVWANDVI

SEQ ID NO: 89363 - protein, 9 aa, synthetic construct
  source 1..9: note = Seed: VVVGAGDVG (KRAS G13D)
IVVWANDVK

SEQ ID NO: 89364 - protein, 9 aa, synthetic construct
  source 1..9: note = Seed: VVVGAGDVG (KRAS G13D)
IVVWANDVL

SEQ ID NO: 89365 - protein, 9 aa, synthetic construct
  source 1..9: note = Seed: VVVGAGDVG (KRAS G13D)
IVVWANDVM

SEQ ID NO: 89366 - protein, 9 aa, synthetic construct
  source 1..9: note = Seed: VVVGAGDVG (KRAS G13D)
IVVWANDVN

SEQ ID NO: 89367 - protein, 9 aa, synthetic construct
  source 1..9: note = Seed: VVVGAGDVG (KRAS G13D)
IVVWANDVP

SEQ ID NO: 89368 - protein, 9 aa, synthetic construct
  source 1..9: note = Seed: VVVGAGDVG (KRAS G13D)
IVVWANDVQ

SEQ ID NO: 89369 - protein, 9 aa, synthetic construct
  source 1..9: note = Seed: VVVGAGDVG (KRAS G13D)
IVVWANDVR

SEQ ID NO: 89370 - protein, 9 aa, synthetic construct
  source 1..9: note = Seed: VVVGAGDVG (KRAS G13D)
IVVWANDVS

SEQ ID NO: 89371 - protein, 9 aa, synthetic construct
  source 1..9: note = Seed: VVVGAGDVG (KRAS G13D)
IVVWANDVT

SEQ ID NO: 89372 - protein, 9 aa, synthetic construct
  source 1..9: note = Seed: VVVGAGDVG (KRAS G13D)
IVVWANDVV

SEQ ID NO: 89373 - protein, 9 aa, synthetic construct
  source 1..9: note = Seed: VVVGAGDVG (KRAS G13D)
IVVWANDVW

SEQ ID NO: 89374 - protein, 9 aa, synthetic construct
  source 1..9: note = Seed: VVVGAGDVG (KRAS G13D)
IVVWANDVY

SEQ ID NO: 89375 - protein, 9 aa, synthetic construct
  source 1..9: note = Seed: VVVGAGDVG (KRAS G13D)
IVVWAPDVA

SEQ ID NO: 89376 - protein, 9 aa, synthetic construct
  source 1..9: note = Seed: VVVGAGDVG (KRAS G13D)
IVVWAPDVC

SEQ ID NO: 89377 - protein, 9 aa, synthetic construct
  source 1..9: note = Seed: VVVGAGDVG (KRAS G13D)
IVVWAPDVD

SEQ ID NO: 89378 - protein, 9 aa, synthetic construct
  source 1..9: note = Seed: VVVGAGDVG (KRAS G13D)
IVVWAPDVE

SEQ ID NO: 89379 - protein, 9 aa, synthetic construct
  source 1..9: note = Seed: VVVGAGDVG (KRAS G13D)
IVVWAPDVF

SEQ ID NO: 89380 - protein, 9 aa, synthetic construct
  source 1..9: note = Seed: VVVGAGDVG (KRAS G13D)
IVVWAPDVG

SEQ ID NO: 89381 - protein, 9 aa, synthetic construct
  source 1..9: note = Seed: VVVGAGDVG (KRAS G13D)
IVVWAPDVH

SEQ ID NO: 89382 - protein, 9 aa, synthetic construct
  source 1..9: note = Seed: VVVGAGDVG (KRAS G13D)
IVVWAPDVI

SEQ ID NO: 89383 - protein, 9 aa, synthetic construct
  source 1..9: note = Seed: VVVGAGDVG (KRAS G13D)
IVVWAPDVK

SEQ ID NO: 89384 - protein, 9 aa, synthetic construct
  source 1..9: note = Seed: VVVGAGDVG (KRAS G13D)
IVVWAPDVL

SEQ ID NO: 89385 - protein, 9 aa, synthetic construct
  source 1..9: note = Seed: VVVGAGDVG (KRAS G13D)
IVVWAPDVM

SEQ ID NO: 89386 - protein, 9 aa, synthetic construct
  source 1..9: note = Seed: VVVGAGDVG (KRAS G13D)
IVVWAPDVN

SEQ ID NO: 89387 - protein, 9 aa, synthetic construct
  source 1..9: note = Seed: VVVGAGDVG (KRAS G13D)
IVVWAPDVP

SEQ ID NO: 89388 - protein, 9 aa, synthetic construct
  source 1..9: note = Seed: VVVGAGDVG (KRAS G13D)
IVVWAPDVQ

SEQ ID NO: 89389 - protein, 9 aa, synthetic construct
  source 1..9: note = Seed: VVVGAGDVG (KRAS G13D)
IVVWAPDVR

SEQ ID NO: 89390 - protein, 9 aa, synthetic construct
  source 1..9: note = Seed: VVVGAGDVG (KRAS G13D)
IVVWAPDVS

SEQ ID NO: 89391 - protein, 9 aa, synthetic construct
  source 1..9: note = Seed: VVVGAGDVG (KRAS G13D)
IVVWAPDVT

SEQ ID NO: 89392 - protein, 9 aa, synthetic construct
  source 1..9: note = Seed: VVVGAGDVG (KRAS G13D)
IVVWAPDVV

SEQ ID NO: 89393 - protein, 9 aa, synthetic construct
  source 1..9: note = Seed: VVVGAGDVG (KRAS G13D)
IVVWAPDVW

SEQ ID NO: 89394 - protein, 9 aa, synthetic construct
  source 1..9: note = Seed: VVVGAGDVG (KRAS G13D)
IVVWAPDVY

SEQ ID NO: 89395 - protein, 9 aa, synthetic construct
  source 1..9: note = Seed: VVVGAGDVG (KRAS G13D)
IVVWAQDVA

SEQ ID NO: 89396 - protein, 9 aa, synthetic construct
  source 1..9: note = Seed: VVVGAGDVG (KRAS G13D)
IVVWAQDVF

SEQ ID NO: 89397 - protein, 9 aa, synthetic construct
  source 1..9: note = Seed: VVVGAGDVG (KRAS G13D)
IVVWAQDVH

SEQ ID NO: 89398 - protein, 9 aa, synthetic construct
  source 1..9: note = Seed: VVVGAGDVG (KRAS G13D)
IVVWAQDVI

SEQ ID NO: 89399 - protein, 9 aa, synthetic construct
  source 1..9: note = Seed: VVVGAGDVG (KRAS G13D)
IVVWAQDVL

SEQ ID NO: 89400 - protein, 9 aa, synthetic construct
  source 1..9: note = Seed: VVVGAGDVG (KRAS G13D)
IVVWAQDVM

SEQ ID NO: 89401 - protein, 9 aa, synthetic construct
  source 1..9: note = Seed: VVVGAGDVG (KRAS G13D)
IVVWAQDVQ

SEQ ID NO: 89402 - protein, 9 aa, synthetic construct
  source 1..9: note = Seed: VVVGAGDVG (KRAS G13D)
IVVWAQDVR

SEQ ID NO: 89403 - protein, 9 aa, synthetic construct
  source 1..9: note = Seed: VVVGAGDVG (KRAS G13D)
IVVWAQDVS

SEQ ID NO: 89404 - protein, 9 aa, synthetic construct
  source 1..9: note = Seed: VVVGAGDVG (KRAS G13D)
IVVWAQDVV

SEQ ID NO: 89405 - protein, 9 aa, synthetic construct
  source 1..9: note = Seed: VVVGAGDVG (KRAS G13D)
IVVWAQDVW

SEQ ID NO: 89406 - protein, 9 aa, synthetic construct
  source 1..9: note = Seed: VVVGAGDVG (KRAS G13D)
IVVWAQDVY

SEQ ID NO: 89407 - protein, 9 aa, synthetic construct
  source 1..9: note = Seed: VVVGAGDVG (KRAS G13D)
IVVWARDVA

SEQ ID NO: 89408 - protein, 9 aa, synthetic construct
  source 1..9: note = Seed: VVVGAGDVG (KRAS G13D)
IVVWARDVF

SEQ ID NO: 89409 - protein, 9 aa, synthetic construct
  source 1..9: note = Seed: VVVGAGDVG (KRAS G13D)
IVVWARDVI

SEQ ID NO: 89410 - protein, 9 aa, synthetic construct
  source 1..9: note = Seed: VVVGAGDVG (KRAS G13D)
IVVWARDVL

SEQ ID NO: 89411 - protein, 9 aa, synthetic construct
  source 1..9: note = Seed: VVVGAGDVG (KRAS G13D)
IVVWARDVM

SEQ ID NO: 89412 - protein, 9 aa, synthetic construct
  source 1..9: note = Seed: VVVGAGDVG (KRAS G13D)
IVVWARDVV

SEQ ID NO: 89413 - protein, 9 aa, synthetic construct
  source 1..9: note = Seed: VVVGAGDVG (KRAS G13D)
IVVWARDVY

SEQ ID NO: 89414 - protein, 9 aa, synthetic construct
  source 1..9: note = Seed: VVVGAGDVG (KRAS G13D)
IVVWASDVA

SEQ ID NO: 89415 - protein, 9 aa, synthetic construct
  source 1..9: note = Seed: VVVGAGDVG (KRAS G13D)
IVVWASDVC

SEQ ID NO: 89416 - protein, 9 aa, synthetic construct
  source 1..9: note = Seed: VVVGAGDVG (KRAS G13D)
IVVWASDVD

SEQ ID NO: 89417 - protein, 9 aa, synthetic construct
  source 1..9: note = Seed: VVVGAGDVG (KRAS G13D)
IVVWASDVE

SEQ ID NO: 89418 - protein, 9 aa, synthetic construct
  source 1..9: note = Seed: VVVGAGDVG (KRAS G13D)
IVVWASDVF

SEQ ID NO: 89419 - protein, 9 aa, synthetic construct
  source 1..9: note = Seed: VVVGAGDVG (KRAS G13D)
IVVWASDVG

SEQ ID NO: 89420 - protein, 9 aa, synthetic construct
  source 1..9: note = Seed: VVVGAGDVG (KRAS G13D)
IVVWASDVH

SEQ ID NO: 89421 - protein, 9 aa, synthetic construct
  source 1..9: note = Seed: VVVGAGDVG (KRAS G13D)
IVVWASDVI

SEQ ID NO: 89422 - protein, 9 aa, synthetic construct
  source 1..9: note = Seed: VVVGAGDVG (KRAS G13D)
IVVWASDVK

SEQ ID NO: 89423 - protein, 9 aa, synthetic construct
  source 1..9: note = Seed: VVVGAGDVG (KRAS G13D)
IVVWASDVL

SEQ ID NO: 89424 - protein, 9 aa, synthetic construct
  source 1..9: note = Seed: VVVGAGDVG (KRAS G13D)
IVVWASDVM

SEQ ID NO: 89425 - protein, 9 aa, synthetic construct
  source 1..9: note = Seed: VVVGAGDVG (KRAS G13D)
IVVWASDVN

SEQ ID NO: 89426 - protein, 9 aa, synthetic construct
  source 1..9: note = Seed: VVVGAGDVG (KRAS G13D)
IVVWASDVP

SEQ ID NO: 89427 - protein, 9 aa, synthetic construct
  source 1..9: note = Seed: VVVGAGDVG (KRAS G13D)
IVVWASDVQ

SEQ ID NO: 89428 - protein, 9 aa, synthetic construct
  source 1..9: note = Seed: VVVGAGDVG (KRAS G13D)
IVVWASDVR

SEQ ID NO: 89429 - protein, 9 aa, synthetic construct
  source 1..9: note = Seed: VVVGAGDVG (KRAS G13D)
IVVWASDVS

SEQ ID NO: 89430 - protein, 9 aa, synthetic construct
  source 1..9: note = Seed: VVVGAGDVG (KRAS G13D)
IVVWASDVT

SEQ ID NO: 89431 - protein, 9 aa, synthetic construct
  source 1..9: note = Seed: VVVGAGDVG (KRAS G13D)
IVVWASDVV

SEQ ID NO: 89432 - protein, 9 aa, synthetic construct
  source 1..9: note = Seed: VVVGAGDVG (KRAS G13D)
IVVWASDVW

SEQ ID NO: 89433 - protein, 9 aa, synthetic construct
  source 1..9: note = Seed: VVVGAGDVG (KRAS G13D)
IVVWASDVY

SEQ ID NO: 89434 - protein, 9 aa, synthetic construct
  source 1..9: note = Seed: VVVGAGDVG (KRAS G13D)
IVVWATDVA

SEQ ID NO: 89435 - protein, 9 aa, synthetic construct
  source 1..9: note = Seed: VVVGAGDVG (KRAS G13D)
IVVWATDVF

SEQ ID NO: 89436 - protein, 9 aa, synthetic construct
  source 1..9: note = Seed: VVVGAGDVG (KRAS G13D)
IVVWATDVG

SEQ ID NO: 89437 - protein, 9 aa, synthetic construct
  source 1..9: note = Seed: VVVGAGDVG (KRAS G13D)
IVVWATDVH

SEQ ID NO: 89438 - protein, 9 aa, synthetic construct
  source 1..9: note = Seed: VVVGAGDVG (KRAS G13D)
IVVWATDVI

SEQ ID NO: 89439 - protein, 9 aa, synthetic construct
  source 1..9: note = Seed: VVVGAGDVG (KRAS G13D)
IVVWATDVL

SEQ ID NO: 89440 - protein, 9 aa, synthetic construct
  source 1..9: note = Seed: VVVGAGDVG (KRAS G13D)
IVVWATDVM

SEQ ID NO: 89441 - protein, 9 aa, synthetic construct
  source 1..9: note = Seed: VVVGAGDVG (KRAS G13D)
IVVWATDVN

SEQ ID NO: 89442 - protein, 9 aa, synthetic construct
  source 1..9: note = Seed: VVVGAGDVG (KRAS G13D)
IVVWATDVP

SEQ ID NO: 89443 - protein, 9 aa, synthetic construct
  source 1..9: note = Seed: VVVGAGDVG (KRAS G13D)
IVVWATDVQ

SEQ ID NO: 89444 - protein, 9 aa, synthetic construct
  source 1..9: note = Seed: VVVGAGDVG (KRAS G13D)
IVVWATDVS

SEQ ID NO: 89445 - protein, 9 aa, synthetic construct
  source 1..9: note = Seed: VVVGAGDVG (KRAS G13D)
IVVWATDVT

SEQ ID NO: 89446 - protein, 9 aa, synthetic construct
  source 1..9: note = Seed: VVVGAGDVG (KRAS G13D)
IVVWATDVV

SEQ ID NO: 89447 - protein, 9 aa, synthetic construct
  source 1..9: note = Seed: VVVGAGDVG (KRAS G13D)
IVVWATDVY

SEQ ID NO: 89448 - protein, 9 aa, synthetic construct
  source 1..9: note = Seed: VVVGAGDVG (KRAS G13D)
IVVWAVDVA

SEQ ID NO: 89449 - protein, 9 aa, synthetic construct
  source 1..9: note = Seed: VVVGAGDVG (KRAS G13D)
IVVWAVDVE

SEQ ID NO: 89450 - protein, 9 aa, synthetic construct
  source 1..9: note = Seed: VVVGAGDVG (KRAS G13D)
IVVWAVDVF

SEQ ID NO: 89451 - protein, 9 aa, synthetic construct
  source 1..9: note = Seed: VVVGAGDVG (KRAS G13D)
IVVWAVDVH

SEQ ID NO: 89452 - protein, 9 aa, synthetic construct
  source 1..9: note = Seed: VVVGAGDVG (KRAS G13D)
IVVWAVDVI

SEQ ID NO: 89453 - protein, 9 aa, synthetic construct
  source 1..9: note = Seed: VVVGAGDVG (KRAS G13D)
IVVWAVDVL

SEQ ID NO: 89454 - protein, 9 aa, synthetic construct
  source 1..9: note = Seed: VVVGAGDVG (KRAS G13D)
IVVWAVDVM

SEQ ID NO: 89455 - protein, 9 aa, synthetic construct
  source 1..9: note = Seed: VVVGAGDVG (KRAS G13D)
IVVWAVDVN

SEQ ID NO: 89456 - protein, 9 aa, synthetic construct
  source 1..9: note = Seed: VVVGAGDVG (KRAS G13D)
IVVWAVDVP

SEQ ID NO: 89457 - protein, 9 aa, synthetic construct
  source 1..9: note = Seed: VVVGAGDVG (KRAS G13D)
IVVWAVDVQ

SEQ ID NO: 89458 - protein, 9 aa, synthetic construct
  source 1..9: note = Seed: VVVGAGDVG (KRAS G13D)
IVVWAVDVS

SEQ ID NO: 89459 - protein, 9 aa, synthetic construct
  source 1..9: note = Seed: VVVGAGDVG (KRAS G13D)
IVVWAVDVT

SEQ ID NO: 89460 - protein, 9 aa, synthetic construct
  source 1..9: note = Seed: VVVGAGDVG (KRAS G13D)
IVVWAVDVV

SEQ ID NO: 89461 - protein, 9 aa, synthetic construct
  source 1..9: note = Seed: VVVGAGDVG (KRAS G13D)
IVVWAVDVY

SEQ ID NO: 89462 - protein, 9 aa, synthetic construct
  source 1..9: note = Seed: VVVGAGDVG (KRAS G13D)
IVVWAYDVA

SEQ ID NO: 89463 - protein, 9 aa, synthetic construct
  source 1..9: note = Seed: VVVGAGDVG (KRAS G13D)
IVVWAYDVS

SEQ ID NO: 89464 - protein, 9 aa, synthetic construct
  source 1..9: note = Seed: VVVGAGDVG (KRAS G13D)
IVVYAADVA

SEQ ID NO: 89465 - protein, 9 aa, synthetic construct
  source 1..9: note = Seed: VVVGAGDVG (KRAS G13D)
IVVYAADVD

SEQ ID NO: 89466 - protein, 9 aa, synthetic construct
  source 1..9: note = Seed: VVVGAGDVG (KRAS G13D)
IVVYAADVE

SEQ ID NO: 89467 - protein, 9 aa, synthetic construct
  source 1..9: note = Seed: VVVGAGDVG (KRAS G13D)
IVVYAADVF

SEQ ID NO: 89468 - protein, 9 aa, synthetic construct
  source 1..9: note = Seed: VVVGAGDVG (KRAS G13D)
IVVYAADVG

SEQ ID NO: 89469 - protein, 9 aa, synthetic construct
  source 1..9: note = Seed: VVVGAGDVG (KRAS G13D)
IVVYAADVH

SEQ ID NO: 89470 - protein, 9 aa, synthetic construct
  source 1..9: note = Seed: VVVGAGDVG (KRAS G13D)
IVVYAADVI

SEQ ID NO: 89471 - protein, 9 aa, synthetic construct
  source 1..9: note = Seed: VVVGAGDVG (KRAS G13D)
IVVYAADVL

SEQ ID NO: 89472 - protein, 9 aa, synthetic construct
  source 1..9: note = Seed: VVVGAGDVG (KRAS G13D)
IVVYAADVM

SEQ ID NO: 89473 - protein, 9 aa, synthetic construct
  source 1..9: note = Seed: VVVGAGDVG (KRAS G13D)
IVVYAADVN

SEQ ID NO: 89474 - protein, 9 aa, synthetic construct
  source 1..9: note = Seed: VVVGAGDVG (KRAS G13D)
IVVYAADVP

SEQ ID NO: 89475 - protein, 9 aa, synthetic construct
  source 1..9: note = Seed: VVVGAGDVG (KRAS G13D)
IVVYAADVQ

SEQ ID NO: 89476 - protein, 9 aa, synthetic construct
  source 1..9: note = Seed: VVVGAGDVG (KRAS G13D)
IVVYAADVR

SEQ ID NO: 89477 - protein, 9 aa, synthetic construct
  source 1..9: note = Seed: VVVGAGDVG (KRAS G13D)
IVVYAADVS

SEQ ID NO: 89478 - protein, 9 aa, synthetic construct
  source 1..9: note = Seed: VVVGAGDVG (KRAS G13D)
IVVYAADVT

SEQ ID NO: 89479 - protein, 9 aa, synthetic construct
  source 1..9: note = Seed: VVVGAGDVG (KRAS G13D)
IVVYAADVV

SEQ ID NO: 89480 - protein, 9 aa, synthetic construct
  source 1..9: note = Seed: VVVGAGDVG (KRAS G13D)
IVVYAADVY

SEQ ID NO: 89481 - protein, 9 aa, synthetic construct
  source 1..9: note = Seed: VVVGAGDVG (KRAS G13D)
IVVYADDVA

SEQ ID NO: 89482 - protein, 9 aa, synthetic construct
  source 1..9: note = Seed: VVVGAGDVG (KRAS G13D)
IVVYADDVC

SEQ ID NO: 89483 - protein, 9 aa, synthetic construct
  source 1..9: note = Seed: VVVGAGDVG (KRAS G13D)
IVVYADDVD

SEQ ID NO: 89484 - protein, 9 aa, synthetic construct
  source 1..9: note = Seed: VVVGAGDVG (KRAS G13D)
IVVYADDVE

SEQ ID NO: 89485 - protein, 9 aa, synthetic construct
  source 1..9: note = Seed: VVVGAGDVG (KRAS G13D)
IVVYADDVF

SEQ ID NO: 89486 - protein, 9 aa, synthetic construct
  source 1..9: note = Seed: VVVGAGDVG (KRAS G13D)
IVVYADDVG

SEQ ID NO: 89487 - protein, 9 aa, synthetic construct
  source 1..9: note = Seed: VVVGAGDVG (KRAS G13D)
IVVYADDVH

SEQ ID NO: 89488 - protein, 9 aa, synthetic construct
  source 1..9: note = Seed: VVVGAGDVG (KRAS G13D)
IVVYADDVI

SEQ ID NO: 89489 - protein, 9 aa, synthetic construct
  source 1..9: note = Seed: VVVGAGDVG (KRAS G13D)
IVVYADDVK

SEQ ID NO: 89490 - protein, 9 aa, synthetic construct
  source 1..9: note = Seed: VVVGAGDVG (KRAS G13D)
IVVYADDVL

SEQ ID NO: 89491 - protein, 9 aa, synthetic construct
  source 1..9: note = Seed: VVVGAGDVG (KRAS G13D)
IVVYADDVM

SEQ ID NO: 89492 - protein, 9 aa, synthetic construct
  source 1..9: note = Seed: VVVGAGDVG (KRAS G13D)
IVVYADDVN

SEQ ID NO: 89493 - protein, 9 aa, synthetic construct
  source 1..9: note = Seed: VVVGAGDVG (KRAS G13D)
IVVYADDVP

SEQ ID NO: 89494 - protein, 9 aa, synthetic construct
  source 1..9: note = Seed: VVVGAGDVG (KRAS G13D)
IVVYADDVQ

SEQ ID NO: 89495 - protein, 9 aa, synthetic construct
  source 1..9: note = Seed: VVVGAGDVG (KRAS G13D)
IVVYADDVR

SEQ ID NO: 89496 - protein, 9 aa, synthetic construct
  source 1..9: note = Seed: VVVGAGDVG (KRAS G13D)
IVVYADDVS

SEQ ID NO: 89497 - protein, 9 aa, synthetic construct
  source 1..9: note = Seed: VVVGAGDVG (KRAS G13D)
IVVYADDVT

SEQ ID NO: 89498 - protein, 9 aa, synthetic construct
  source 1..9: note = Seed: VVVGAGDVG (KRAS G13D)
IVVYADDVV

SEQ ID NO: 89499 - protein, 9 aa, synthetic construct
  source 1..9: note = Seed: VVVGAGDVG (KRAS G13D)
IVVYADDVW

SEQ ID NO: 89500 - protein, 9 aa, synthetic construct
  source 1..9: note = Seed: VVVGAGDVG (KRAS G13D)
IVVYADDVY

SEQ ID NO: 89501 - protein, 9 aa, synthetic construct
  source 1..9: note = Seed: VVVGAGDVG (KRAS G13D)
IVVYAEDVA

SEQ ID NO: 89502 - protein, 9 aa, synthetic construct
  source 1..9: note = Seed: VVVGAGDVG (KRAS G13D)
IVVYAEDVF

SEQ ID NO: 89503 - protein, 9 aa, synthetic construct
  source 1..9: note = Seed: VVVGAGDVG (KRAS G13D)
IVVYAEDVI

SEQ ID NO: 89504 - protein, 9 aa, synthetic construct
  source 1..9: note = Seed: VVVGAGDVG (KRAS G13D)
IVVYAEDVL

SEQ ID NO: 89505 - protein, 9 aa, synthetic construct
  source 1..9: note = Seed: VVVGAGDVG (KRAS G13D)
IVVYAEDVM

SEQ ID NO: 89506 - protein, 9 aa, synthetic construct
  source 1..9: note = Seed: VVVGAGDVG (KRAS G13D)
IVVYAEDVS

SEQ ID NO: 89507 - protein, 9 aa, synthetic construct
  source 1..9: note = Seed: VVVGAGDVG (KRAS G13D)
IVVYAEDVV

SEQ ID NO: 89508 - protein, 9 aa, synthetic construct
  source 1..9: note = Seed: VVVGAGDVG (KRAS G13D)
IVVYAEDVY

SEQ ID NO: 89509 - protein, 9 aa, synthetic construct
  source 1..9: note = Seed: VVVGAGDVG (KRAS G13D)
IVVYAGDVA

SEQ ID NO: 89510 - protein, 9 aa, synthetic construct
  source 1..9: note = Seed: VVVGAGDVG (KRAS G13D)
IVVYAGDVI

SEQ ID NO: 89511 - protein, 9 aa, synthetic construct
  source 1..9: note = Seed: VVVGAGDVG (KRAS G13D)
IVVYAGDVL

SEQ ID NO: 89512 - protein, 9 aa, synthetic construct
  source 1..9: note = Seed: VVVGAGDVG (KRAS G13D)
IVVYAGDVV

SEQ ID NO: 89513 - protein, 9 aa, synthetic construct
  source 1..9: note = Seed: VVVGAGDVG (KRAS G13D)
IVVYAHDVA

SEQ ID NO: 89514 - protein, 9 aa, synthetic construct
  source 1..9: note = Seed: VVVGAGDVG (KRAS G13D)
IVVYAHDVI

SEQ ID NO: 89515 - protein, 9 aa, synthetic construct
  source 1..9: note = Seed: VVVGAGDVG (KRAS G13D)
IVVYAHDVL

SEQ ID NO: 89516 - protein, 9 aa, synthetic construct
  source 1..9: note = Seed: VVVGAGDVG (KRAS G13D)
IVVYAHDVM

SEQ ID NO: 89517 - protein, 9 aa, synthetic construct
  source 1..9: note = Seed: VVVGAGDVG (KRAS G13D)
IVVYAHDVV

SEQ ID NO: 89518 - protein, 9 aa, synthetic construct
  source 1..9: note = Seed: VVVGAGDVG (KRAS G13D)
IVVYAHDVY

SEQ ID NO: 89519 - protein, 9 aa, synthetic construct
  source 1..9: note = Seed: VVVGAGDVG (KRAS G13D)
IVVYAIDVA

SEQ ID NO: 89520 - protein, 9 aa, synthetic construct
  source 1..9: note = Seed: VVVGAGDVG (KRAS G13D)
IVVYAIDVD

SEQ ID NO: 89521 - protein, 9 aa, synthetic construct
  source 1..9: note = Seed: VVVGAGDVG (KRAS G13D)
IVVYAIDVE

SEQ ID NO: 89522 - protein, 9 aa, synthetic construct
  source 1..9: note = Seed: VVVGAGDVG (KRAS G13D)
IVVYAIDVF

SEQ ID NO: 89523 - protein, 9 aa, synthetic construct
  source 1..9: note = Seed: VVVGAGDVG (KRAS G13D)
IVVYAIDVH

SEQ ID NO: 89524 - protein, 9 aa, synthetic construct
  source 1..9: note = Seed: VVVGAGDVG (KRAS G13D)
IVVYAIDVI

SEQ ID NO: 89525 - protein, 9 aa, synthetic construct
  source 1..9: note = Seed: VVVGAGDVG (KRAS G13D)
IVVYAIDVL

SEQ ID NO: 89526 - protein, 9 aa, synthetic construct
  source 1..9: note = Seed: VVVGAGDVG (KRAS G13D)
IVVYAIDVM

SEQ ID NO: 89527 - protein, 9 aa, synthetic construct
  source 1..9: note = Seed: VVVGAGDVG (KRAS G13D)
IVVYAIDVN

SEQ ID NO: 89528 - protein, 9 aa, synthetic construct
  source 1..9: note = Seed: VVVGAGDVG (KRAS G13D)
IVVYAIDVQ

SEQ ID NO: 89529 - protein, 9 aa, synthetic construct
  source 1..9: note = Seed: VVVGAGDVG (KRAS G13D)
IVVYAIDVR

SEQ ID NO: 89530 - protein, 9 aa, synthetic construct
  source 1..9: note = Seed: VVVGAGDVG (KRAS G13D)
IVVYAIDVS

SEQ ID NO: 89531 - protein, 9 aa, synthetic construct
  source 1..9: note = Seed: VVVGAGDVG (KRAS G13D)
IVVYAIDVV

SEQ ID NO: 89532 - protein, 9 aa, synthetic construct
  source 1..9: note = Seed: VVVGAGDVG (KRAS G13D)
IVVYAIDVY

SEQ ID NO: 89533 - protein, 9 aa, synthetic construct
  source 1..9: note = Seed: VVVGAGDVG (KRAS G13D)
IVVYALDVA

SEQ ID NO: 89534 - protein, 9 aa, synthetic construct
  source 1..9: note = Seed: VVVGAGDVG (KRAS G13D)
IVVYALDVM

SEQ ID NO: 89535 - protein, 9 aa, synthetic construct
  source 1..9: note = Seed: VVVGAGDVG (KRAS G13D)
IVVYALDVP

SEQ ID NO: 89536 - protein, 9 aa, synthetic construct
  source 1..9: note = Seed: VVVGAGDVG (KRAS G13D)
IVVYALDVQ

SEQ ID NO: 89537 - protein, 9 aa, synthetic construct
  source 1..9: note = Seed: VVVGAGDVG (KRAS G13D)
IVVYALDVY

SEQ ID NO: 89538 - protein, 9 aa, synthetic construct
  source 1..9: note = Seed: VVVGAGDVG (KRAS G13D)
IVVYAMDVA

SEQ ID NO: 89539 - protein, 9 aa, synthetic construct
  source 1..9: note = Seed: VVVGAGDVG (KRAS G13D)
IVVYAMDVD

SEQ ID NO: 89540 - protein, 9 aa, synthetic construct
  source 1..9: note = Seed: VVVGAGDVG (KRAS G13D)
IVVYAMDVE

SEQ ID NO: 89541 - protein, 9 aa, synthetic construct
  source 1..9: note = Seed: VVVGAGDVG (KRAS G13D)
IVVYAMDVF

SEQ ID NO: 89542 - protein, 9 aa, synthetic construct
  source 1..9: note = Seed: VVVGAGDVG (KRAS G13D)
IVVYAMDVH

SEQ ID NO: 89543 - protein, 9 aa, synthetic construct
  source 1..9: note = Seed: VVVGAGDVG (KRAS G13D)
IVVYAMDVI

SEQ ID NO: 89544 - protein, 9 aa, synthetic construct
  source 1..9: note = Seed: VVVGAGDVG (KRAS G13D)
IVVYAMDVL

SEQ ID NO: 89545 - protein, 9 aa, synthetic construct
  source 1..9: note = Seed: VVVGAGDVG (KRAS G13D)
IVVYAMDVM

SEQ ID NO: 89546 - protein, 9 aa, synthetic construct
  source 1..9: note = Seed: VVVGAGDVG (KRAS G13D)
IVVYAMDVN

SEQ ID NO: 89547 - protein, 9 aa, synthetic construct
  source 1..9: note = Seed: VVVGAGDVG (KRAS G13D)
IVVYAMDVQ

SEQ ID NO: 89548 - protein, 9 aa, synthetic construct
  source 1..9: note = Seed: VVVGAGDVG (KRAS G13D)
IVVYAMDVR

SEQ ID NO: 89549 - protein, 9 aa, synthetic construct
  source 1..9: note = Seed: VVVGAGDVG (KRAS G13D)
IVVYAMDVS

SEQ ID NO: 89550 - protein, 9 aa, synthetic construct
  source 1..9: note = Seed: VVVGAGDVG (KRAS G13D)
IVVYAMDVV

SEQ ID NO: 89551 - protein, 9 aa, synthetic construct
  source 1..9: note = Seed: VVVGAGDVG (KRAS G13D)
IVVYAMDVY

SEQ ID NO: 89552 - protein, 9 aa, synthetic construct
  source 1..9: note = Seed: VVVGAGDVG (KRAS G13D)
IVVYANDVA

SEQ ID NO: 89553 - protein, 9 aa, synthetic construct
  source 1..9: note = Seed: VVVGAGDVG (KRAS G13D)
IVVYANDVC

SEQ ID NO: 89554 - protein, 9 aa, synthetic construct
  source 1..9: note = Seed: VVVGAGDVG (KRAS G13D)
IVVYANDVD

SEQ ID NO: 89555 - protein, 9 aa, synthetic construct
  source 1..9: note = Seed: VVVGAGDVG (KRAS G13D)
IVVYANDVE

SEQ ID NO: 89556 - protein, 9 aa, synthetic construct
  source 1..9: note = Seed: VVVGAGDVG (KRAS G13D)
IVVYANDVF

SEQ ID NO: 89557 - protein, 9 aa, synthetic construct
  source 1..9: note = Seed: VVVGAGDVG (KRAS G13D)
IVVYANDVG

SEQ ID NO: 89558 - protein, 9 aa, synthetic construct
  source 1..9: note = Seed: VVVGAGDVG (KRAS G13D)
IVVYANDVH

SEQ ID NO: 89559 - protein, 9 aa, synthetic construct
  source 1..9: note = Seed: VVVGAGDVG (KRAS G13D)
IVVYANDVI

SEQ ID NO: 89560 - protein, 9 aa, synthetic construct
  source 1..9: note = Seed: VVVGAGDVG (KRAS G13D)
IVVYANDVK

SEQ ID NO: 89561 - protein, 9 aa, synthetic construct
  source 1..9: note = Seed: VVVGAGDVG (KRAS G13D)
IVVYANDVL

SEQ ID NO: 89562 - protein, 9 aa, synthetic construct
  source 1..9: note = Seed: VVVGAGDVG (KRAS G13D)
IVVYANDVM

SEQ ID NO: 89563 - protein, 9 aa, synthetic construct
  source 1..9: note = Seed: VVVGAGDVG (KRAS G13D)
IVVYANDVN

SEQ ID NO: 89564 - protein, 9 aa, synthetic construct
  source 1..9: note = Seed: VVVGAGDVG (KRAS G13D)
IVVYANDVQ

SEQ ID NO: 89565 - protein, 9 aa, synthetic construct
  source 1..9: note = Seed: VVVGAGDVG (KRAS G13D)
IVVYANDVR

SEQ ID NO: 89566 - protein, 9 aa, synthetic construct
  source 1..9: note = Seed: VVVGAGDVG (KRAS G13D)
IVVYANDVS

SEQ ID NO: 89567 - protein, 9 aa, synthetic construct
  source 1..9: note = Seed: VVVGAGDVG (KRAS G13D)
IVVYANDVT

SEQ ID NO: 89568 - protein, 9 aa, synthetic construct
  source 1..9: note = Seed: VVVGAGDVG (KRAS G13D)
IVVYANDVV

SEQ ID NO: 89569 - protein, 9 aa, synthetic construct
  source 1..9: note = Seed: VVVGAGDVG (KRAS G13D)
IVVYANDVW

SEQ ID NO: 89570 - protein, 9 aa, synthetic construct
  source 1..9: note = Seed: VVVGAGDVG (KRAS G13D)
IVVYANDVY

SEQ ID NO: 89571 - protein, 9 aa, synthetic construct
  source 1..9: note = Seed: VVVGAGDVG (KRAS G13D)
IVVYAPDVA

SEQ ID NO: 89572 - protein, 9 aa, synthetic construct
  source 1..9: note = Seed: VVVGAGDVG (KRAS G13D)
IVVYAPDVD

SEQ ID NO: 89573 - protein, 9 aa, synthetic construct
  source 1..9: note = Seed: VVVGAGDVG (KRAS G13D)
IVVYAPDVE

SEQ ID NO: 89574 - protein, 9 aa, synthetic construct
  source 1..9: note = Seed: VVVGAGDVG (KRAS G13D)
IVVYAPDVF

SEQ ID NO: 89575 - protein, 9 aa, synthetic construct
  source 1..9: note = Seed: VVVGAGDVG (KRAS G13D)
IVVYAPDVG

SEQ ID NO: 89576 - protein, 9 aa, synthetic construct
  source 1..9: note = Seed: VVVGAGDVG (KRAS G13D)
IVVYAPDVH

SEQ ID NO: 89577 - protein, 9 aa, synthetic construct
  source 1..9: note = Seed: VVVGAGDVG (KRAS G13D)
IVVYAPDVI

SEQ ID NO: 89578 - protein, 9 aa, synthetic construct
  source 1..9: note = Seed: VVVGAGDVG (KRAS G13D)
IVVYAPDVK

SEQ ID NO: 89579 - protein, 9 aa, synthetic construct
  source 1..9: note = Seed: VVVGAGDVG (KRAS G13D)
IVVYAPDVL

SEQ ID NO: 89580 - protein, 9 aa, synthetic construct
  source 1..9: note = Seed: VVVGAGDVG (KRAS G13D)
IVVYAPDVM

SEQ ID NO: 89581 - protein, 9 aa, synthetic construct
  source 1..9: note = Seed: VVVGAGDVG (KRAS G13D)
IVVYAPDVN

SEQ ID NO: 89582 - protein, 9 aa, synthetic construct
  source 1..9: note = Seed: VVVGAGDVG (KRAS G13D)
IVVYAPDVQ

SEQ ID NO: 89583 - protein, 9 aa, synthetic construct
  source 1..9: note = Seed: VVVGAGDVG (KRAS G13D)
IVVYAPDVR

SEQ ID NO: 89584 - protein, 9 aa, synthetic construct
  source 1..9: note = Seed: VVVGAGDVG (KRAS G13D)
IVVYAPDVS

SEQ ID NO: 89585 - protein, 9 aa, synthetic construct
  source 1..9: note = Seed: VVVGAGDVG (KRAS G13D)
IVVYAPDVT

SEQ ID NO: 89586 - protein, 9 aa, synthetic construct
  source 1..9: note = Seed: VVVGAGDVG (KRAS G13D)
IVVYAPDVV

SEQ ID NO: 89587 - protein, 9 aa, synthetic construct
  source 1..9: note = Seed: VVVGAGDVG (KRAS G13D)
IVVYAPDVW

SEQ ID NO: 89588 - protein, 9 aa, synthetic construct
  source 1..9: note = Seed: VVVGAGDVG (KRAS G13D)
IVVYAPDVY

SEQ ID NO: 89589 - protein, 9 aa, synthetic construct
  source 1..9: note = Seed: VVVGAGDVG (KRAS G13D)
IVVYAQDVA

SEQ ID NO: 89590 - protein, 9 aa, synthetic construct
  source 1..9: note = Seed: VVVGAGDVG (KRAS G13D)
IVVYAQDVF

SEQ ID NO: 89591 - protein, 9 aa, synthetic construct
  source 1..9: note = Seed: VVVGAGDVG (KRAS G13D)
IVVYAQDVI

SEQ ID NO: 89592 - protein, 9 aa, synthetic construct
  source 1..9: note = Seed: VVVGAGDVG (KRAS G13D)
IVVYAQDVL

SEQ ID NO: 89593 - protein, 9 aa, synthetic construct
  source 1..9: note = Seed: VVVGAGDVG (KRAS G13D)
IVVYAQDVM

SEQ ID NO: 89594 - protein, 9 aa, synthetic construct
  source 1..9: note = Seed: VVVGAGDVG (KRAS G13D)
IVVYAQDVQ

SEQ ID NO: 89595 - protein, 9 aa, synthetic construct
  source 1..9: note = Seed: VVVGAGDVG (KRAS G13D)
IVVYAQDVS

SEQ ID NO: 89596 - protein, 9 aa, synthetic construct
  source 1..9: note = Seed: VVVGAGDVG (KRAS G13D)
IVVYAQDVV

SEQ ID NO: 89597 - protein, 9 aa, synthetic construct
  source 1..9: note = Seed: VVVGAGDVG (KRAS G13D)
IVVYAQDVY

SEQ ID NO: 89598 - protein, 9 aa, synthetic construct
  source 1..9: note = Seed: VVVGAGDVG (KRAS G13D)
IVVYARDVI

SEQ ID NO: 89599 - protein, 9 aa, synthetic construct
  source 1..9: note = Seed: VVVGAGDVG (KRAS G13D)
IVVYARDVL

SEQ ID NO: 89600 - protein, 9 aa, synthetic construct
  source 1..9: note = Seed: VVVGAGDVG (KRAS G13D)
IVVYARDVV

SEQ ID NO: 89601 - protein, 9 aa, synthetic construct
  source 1..9: note = Seed: VVVGAGDVG (KRAS G13D)
IVVYASDVA

SEQ ID NO: 89602 - protein, 9 aa, synthetic construct
  source 1..9: note = Seed: VVVGAGDVG (KRAS G13D)
IVVYASDVF

SEQ ID NO: 89603 - protein, 9 aa, synthetic construct
  source 1..9: note = Seed: VVVGAGDVG (KRAS G13D)
IVVYASDVG

SEQ ID NO: 89604 - protein, 9 aa, synthetic construct
  source 1..9: note = Seed: VVVGAGDVG (KRAS G13D)
IVVYASDVH

SEQ ID NO: 89605 - protein, 9 aa, synthetic construct
  source 1..9: note = Seed: VVVGAGDVG (KRAS G13D)
IVVYASDVI

SEQ ID NO: 89606 - protein, 9 aa, synthetic construct
  source 1..9: note = Seed: VVVGAGDVG (KRAS G13D)
IVVYASDVL

SEQ ID NO: 89607 - protein, 9 aa, synthetic construct
  source 1..9: note = Seed: VVVGAGDVG (KRAS G13D)
IVVYASDVM

SEQ ID NO: 89608 - protein, 9 aa, synthetic construct
  source 1..9: note = Seed: VVVGAGDVG (KRAS G13D)
IVVYASDVN

SEQ ID NO: 89609 - protein, 9 aa, synthetic construct
  source 1..9: note = Seed: VVVGAGDVG (KRAS G13D)
IVVYASDVP

SEQ ID NO: 89610 - protein, 9 aa, synthetic construct
  source 1..9: note = Seed: VVVGAGDVG (KRAS G13D)
IVVYASDVQ

SEQ ID NO: 89611 - protein, 9 aa, synthetic construct
  source 1..9: note = Seed: VVVGAGDVG (KRAS G13D)
IVVYASDVR

SEQ ID NO: 89612 - protein, 9 aa, synthetic construct
  source 1..9: note = Seed: VVVGAGDVG (KRAS G13D)
IVVYASDVS

SEQ ID NO: 89613 - protein, 9 aa, synthetic construct
  source 1..9: note = Seed: VVVGAGDVG (KRAS G13D)
IVVYASDVT

SEQ ID NO: 89614 - protein, 9 aa, synthetic construct
  source 1..9: note = Seed: VVVGAGDVG (KRAS G13D)
IVVYASDVV

SEQ ID NO: 89615 - protein, 9 aa, synthetic construct
  source 1..9: note = Seed: VVVGAGDVG (KRAS G13D)
IVVYASDVY

SEQ ID NO: 89616 - protein, 9 aa, synthetic construct
  source 1..9: note = Seed: VVVGAGDVG (KRAS G13D)
IVVYATDVA

SEQ ID NO: 89617 - protein, 9 aa, synthetic construct
  source 1..9: note = Seed: VVVGAGDVG (KRAS G13D)
IVVYATDVF

SEQ ID NO: 89618 - protein, 9 aa, synthetic construct
  source 1..9: note = Seed: VVVGAGDVG (KRAS G13D)
IVVYATDVH

SEQ ID NO: 89619 - protein, 9 aa, synthetic construct
  source 1..9: note = Seed: VVVGAGDVG (KRAS G13D)
IVVYATDVI

SEQ ID NO: 89620 - protein, 9 aa, synthetic construct
  source 1..9: note = Seed: VVVGAGDVG (KRAS G13D)
IVVYATDVL

SEQ ID NO: 89621 - protein, 9 aa, synthetic construct
  source 1..9: note = Seed: VVVGAGDVG (KRAS G13D)
IVVYATDVM

SEQ ID NO: 89622 - protein, 9 aa, synthetic construct
  source 1..9: note = Seed: VVVGAGDVG (KRAS G13D)
IVVYATDVN

SEQ ID NO: 89623 - protein, 9 aa, synthetic construct
  source 1..9: note = Seed: VVVGAGDVG (KRAS G13D)
IVVYATDVQ

SEQ ID NO: 89624 - protein, 9 aa, synthetic construct
  source 1..9: note = Seed: VVVGAGDVG (KRAS G13D)
IVVYATDVS

SEQ ID NO: 89625 - protein, 9 aa, synthetic construct
  source 1..9: note = Seed: VVVGAGDVG (KRAS G13D)
IVVYATDVT

SEQ ID NO: 89626 - protein, 9 aa, synthetic construct
  source 1..9: note = Seed: VVVGAGDVG (KRAS G13D)
IVVYATDVV

SEQ ID NO: 89627 - protein, 9 aa, synthetic construct
  source 1..9: note = Seed: VVVGAGDVG (KRAS G13D)
IVVYATDVY

SEQ ID NO: 89628 - protein, 9 aa, synthetic construct
  source 1..9: note = Seed: VVVGAGDVG (KRAS G13D)
IVVYAVDVA

SEQ ID NO: 89629 - protein, 9 aa, synthetic construct
  source 1..9: note = Seed: VVVGAGDVG (KRAS G13D)
IVVYAVDVL

SEQ ID NO: 89630 - protein, 9 aa, synthetic construct
  source 1..9: note = Seed: VVVGAGDVG (KRAS G13D)
IVVYAVDVM

SEQ ID NO: 89631 - protein, 9 aa, synthetic construct
  source 1..9: note = Seed: VVVGAGDVG (KRAS G13D)
IVVYAVDVN

SEQ ID NO: 89632 - protein, 9 aa, synthetic construct
  source 1..9: note = Seed: VVVGAGDVG (KRAS G13D)
IVVYAVDVP

SEQ ID NO: 89633 - protein, 9 aa, synthetic construct
  source 1..9: note = Seed: VVVGAGDVG (KRAS G13D)
IVVYAVDVQ

SEQ ID NO: 89634 - protein, 9 aa, synthetic construct
  source 1..9: note = Seed: VVVGAGDVG (KRAS G13D)
IVVYAVDVR

SEQ ID NO: 89635 - protein, 9 aa, synthetic construct
  source 1..9: note = Seed: VVVGAGDVG (KRAS G13D)
IVVYAVDVS

SEQ ID NO: 89636 - protein, 9 aa, synthetic construct
  source 1..9: note = Seed: VVVGAGDVG (KRAS G13D)
IVVYAVDVV

SEQ ID NO: 89637 - protein, 9 aa, synthetic construct
  source 1..9: note = Seed: VVVGAGDVG (KRAS G13D)
IVVYAVDVY

SEQ ID NO: 89638 - protein, 9 aa, synthetic construct
  source 1..9: note = Seed: VVVGAGDVG (KRAS G13D)
KVVFAADVV

SEQ ID NO: 89639 - protein, 9 aa, synthetic construct
  source 1..9: note = Seed: VVVGAGDVG (KRAS G13D)
KVVFAIDVA

SEQ ID NO: 89640 - protein, 9 aa, synthetic construct
  source 1..9: note = Seed: VVVGAGDVG (KRAS G13D)
KVVFANDVA

SEQ ID NO: 89641 - protein, 9 aa, synthetic construct
  source 1..9: note = Seed: VVVGAGDVG (KRAS G13D)
KVVFASDVV

SEQ ID NO: 89642 - protein, 9 aa, synthetic construct
  source 1..9: note = Seed: VVVGAGDVG (KRAS G13D)
KVVFAVDVA

SEQ ID NO: 89643 - protein, 9 aa, synthetic construct
  source 1..9: note = Seed: VVVGAGDVG (KRAS G13D)
KVVWAADVV

SEQ ID NO: 89644 - protein, 9 aa, synthetic construct
  source 1..9: note = Seed: VVVGAGDVG (KRAS G13D)
KVVWAEDVV

SEQ ID NO: 89645 - protein, 9 aa, synthetic construct
  source 1..9: note = Seed: VVVGAGDVG (KRAS G13D)
KVVWAIDVS

SEQ ID NO: 89646 - protein, 9 aa, synthetic construct
  source 1..9: note = Seed: VVVGAGDVG (KRAS G13D)
KVVWANDVA

SEQ ID NO: 89647 - protein, 9 aa, synthetic construct
  source 1..9: note = Seed: VVVGAGDVG (KRAS G13D)
KVVWANDVS

SEQ ID NO: 89648 - protein, 9 aa, synthetic construct
  source 1..9: note = Seed: VVVGAGDVG (KRAS G13D)
KVVWASDVV

SEQ ID NO: 89649 - protein, 9 aa, synthetic construct
  source 1..9: note = Seed: VVVGAGDVG (KRAS G13D)
KVVWATDVI

SEQ ID NO: 89650 - protein, 9 aa, synthetic construct
  source 1..9: note = Seed: VVVGAGDVG (KRAS G13D)
KVVWATDVM

SEQ ID NO: 89651 - protein, 9 aa, synthetic construct
  source 1..9: note = Seed: VVVGAGDVG (KRAS G13D)
KVVWATDVV

SEQ ID NO: 89652 - protein, 9 aa, synthetic construct
  source 1..9: note = Seed: VVVGAGDVG (KRAS G13D)
KVVWAVDVV

SEQ ID NO: 89653 - protein, 9 aa, synthetic construct
  source 1..9: note = Seed: VVVGAGDVG (KRAS G13D)
KVVYASDVI

SEQ ID NO: 89654 - protein, 9 aa, synthetic construct
  source 1..9: note = Seed: VVVGAGDVG (KRAS G13D)
KVVYASDVM

SEQ ID NO: 89655 - protein, 9 aa, synthetic construct
  source 1..9: note = Seed: VVVGAGDVG (KRAS G13D)
LVVAAADVA

SEQ ID NO: 89656 - protein, 9 aa, synthetic construct
  source 1..9: note = Seed: VVVGAGDVG (KRAS G13D)
LVVAAADVC

SEQ ID NO: 89657 - protein, 9 aa, synthetic construct
  source 1..9: note = Seed: VVVGAGDVG (KRAS G13D)
LVVAAADVD

SEQ ID NO: 89658 - protein, 9 aa, synthetic construct
  source 1..9: note = Seed: VVVGAGDVG (KRAS G13D)
LVVAAADVE

SEQ ID NO: 89659 - protein, 9 aa, synthetic construct
  source 1..9: note = Seed: VVVGAGDVG (KRAS G13D)
LVVAAADVF

SEQ ID NO: 89660 - protein, 9 aa, synthetic construct
  source 1..9: note = Seed: VVVGAGDVG (KRAS G13D)
LVVAAADVG

SEQ ID NO: 89661 - protein, 9 aa, synthetic construct
  source 1..9: note = Seed: VVVGAGDVG (KRAS G13D)
LVVAAADVH

SEQ ID NO: 89662 - protein, 9 aa, synthetic construct
  source 1..9: note = Seed: VVVGAGDVG (KRAS G13D)
LVVAAADVI

SEQ ID NO: 89663 - protein, 9 aa, synthetic construct
  source 1..9: note = Seed: VVVGAGDVG (KRAS G13D)
LVVAAADVL

SEQ ID NO: 89664 - protein, 9 aa, synthetic construct
  source 1..9: note = Seed: VVVGAGDVG (KRAS G13D)
LVVAAADVM

SEQ ID NO: 89665 - protein, 9 aa, synthetic construct
  source 1..9: note = Seed: VVVGAGDVG (KRAS G13D)
LVVAAADVN

SEQ ID NO: 89666 - protein, 9 aa, synthetic construct
  source 1..9: note = Seed: VVVGAGDVG (KRAS G13D)
LVVAAADVP

SEQ ID NO: 89667 - protein, 9 aa, synthetic construct
  source 1..9: note = Seed: VVVGAGDVG (KRAS G13D)
LVVAAADVQ

SEQ ID NO: 89668 - protein, 9 aa, synthetic construct
  source 1..9: note = Seed: VVVGAGDVG (KRAS G13D)
LVVAAADVS

SEQ ID NO: 89669 - protein, 9 aa, synthetic construct
  source 1..9: note = Seed: VVVGAGDVG (KRAS G13D)
LVVAAADVT

SEQ ID NO: 89670 - protein, 9 aa, synthetic construct
  source 1..9: note = Seed: VVVGAGDVG (KRAS G13D)
LVVAAADVV

SEQ ID NO: 89671 - protein, 9 aa, synthetic construct
  source 1..9: note = Seed: VVVGAGDVG (KRAS G13D)
LVVAAADVY

SEQ ID NO: 89672 - protein, 9 aa, synthetic construct
  source 1..9: note = Seed: VVVGAGDVG (KRAS G13D)
LVVAADDVA

SEQ ID NO: 89673 - protein, 9 aa, synthetic construct
  source 1..9: note = Seed: VVVGAGDVG (KRAS G13D)
LVVAADDVF

SEQ ID NO: 89674 - protein, 9 aa, synthetic construct
  source 1..9: note = Seed: VVVGAGDVG (KRAS G13D)
LVVAADDVG

SEQ ID NO: 89675 - protein, 9 aa, synthetic construct
  source 1..9: note = Seed: VVVGAGDVG (KRAS G13D)
LVVAADDVI

SEQ ID NO: 89676 - protein, 9 aa, synthetic construct
  source 1..9: note = Seed: VVVGAGDVG (KRAS G13D)
LVVAADDVL

SEQ ID NO: 89677 - protein, 9 aa, synthetic construct
  source 1..9: note = Seed: VVVGAGDVG (KRAS G13D)
LVVAADDVM

SEQ ID NO: 89678 - protein, 9 aa, synthetic construct
  source 1..9: note = Seed: VVVGAGDVG (KRAS G13D)
LVVAADDVN

SEQ ID NO: 89679 - protein, 9 aa, synthetic construct
  source 1..9: note = Seed: VVVGAGDVG (KRAS G13D)
LVVAADDVQ

SEQ ID NO: 89680 - protein, 9 aa, synthetic construct
  source 1..9: note = Seed: VVVGAGDVG (KRAS G13D)
LVVAADDVS

SEQ ID NO: 89681 - protein, 9 aa, synthetic construct
  source 1..9: note = Seed: VVVGAGDVG (KRAS G13D)
LVVAADDVT

SEQ ID NO: 89682 - protein, 9 aa, synthetic construct
  source 1..9: note = Seed: VVVGAGDVG (KRAS G13D)
LVVAADDVV

SEQ ID NO: 89683 - protein, 9 aa, synthetic construct
  source 1..9: note = Seed: VVVGAGDVG (KRAS G13D)
LVVAADDVY

SEQ ID NO: 89684 - protein, 9 aa, synthetic construct
  source 1..9: note = Seed: VVVGAGDVG (KRAS G13D)
LVVAAEDVG

SEQ ID NO: 89685 - protein, 9 aa, synthetic construct
  source 1..9: note = Seed: VVVGAGDVG (KRAS G13D)
LVVAAEDVS

SEQ ID NO: 89686 - protein, 9 aa, synthetic construct
  source 1..9: note = Seed: VVVGAGDVG (KRAS G13D)
LVVAAGDVA

SEQ ID NO: 89687 - protein, 9 aa, synthetic construct
  source 1..9: note = Seed: VVVGAGDVG (KRAS G13D)
LVVAAGDVD

SEQ ID NO: 89688 - protein, 9 aa, synthetic construct
  source 1..9: note = Seed: VVVGAGDVG (KRAS G13D)
LVVAAGDVE

SEQ ID NO: 89689 - protein, 9 aa, synthetic construct
  source 1..9: note = Seed: VVVGAGDVG (KRAS G13D)
LVVAAGDVG

SEQ ID NO: 89690 - protein, 9 aa, synthetic construct
  source 1..9: note = Seed: VVVGAGDVG (KRAS G13D)
LVVAAGDVH

SEQ ID NO: 89691 - protein, 9 aa, synthetic construct
  source 1..9: note = Seed: VVVGAGDVG (KRAS G13D)
LVVAAGDVI

SEQ ID NO: 89692 - protein, 9 aa, synthetic construct
  source 1..9: note = Seed: VVVGAGDVG (KRAS G13D)
LVVAAGDVL

SEQ ID NO: 89693 - protein, 9 aa, synthetic construct
  source 1..9: note = Seed: VVVGAGDVG (KRAS G13D)
LVVAAGDVM

SEQ ID NO: 89694 - protein, 9 aa, synthetic construct
  source 1..9: note = Seed: VVVGAGDVG (KRAS G13D)
LVVAAGDVN

SEQ ID NO: 89695 - protein, 9 aa, synthetic construct
  source 1..9: note = Seed: VVVGAGDVG (KRAS G13D)
LVVAAGDVP

SEQ ID NO: 89696 - protein, 9 aa, synthetic construct
  source 1..9: note = Seed: VVVGAGDVG (KRAS G13D)
LVVAAGDVQ

SEQ ID NO: 89697 - protein, 9 aa, synthetic construct
  source 1..9: note = Seed: VVVGAGDVG (KRAS G13D)
LVVAAGDVS

SEQ ID NO: 89698 - protein, 9 aa, synthetic construct
  source 1..9: note = Seed: VVVGAGDVG (KRAS G13D)
LVVAAGDVT

SEQ ID NO: 89699 - protein, 9 aa, synthetic construct
  source 1..9: note = Seed: VVVGAGDVG (KRAS G13D)
LVVAAGDVV

SEQ ID NO: 89700 - protein, 9 aa, synthetic construct
  source 1..9: note = Seed: VVVGAGDVG (KRAS G13D)
LVVAAGDVY

SEQ ID NO: 89701 - protein, 9 aa, synthetic construct
  source 1..9: note = Seed: VVVGAGDVG (KRAS G13D)
LVVAAHDVA

SEQ ID NO: 89702 - protein, 9 aa, synthetic construct
  source 1..9: note = Seed: VVVGAGDVG (KRAS G13D)
LVVAAHDVG

SEQ ID NO: 89703 - protein, 9 aa, synthetic construct
  source 1..9: note = Seed: VVVGAGDVG (KRAS G13D)
LVVAAHDVS

SEQ ID NO: 89704 - protein, 9 aa, synthetic construct
  source 1..9: note = Seed: VVVGAGDVG (KRAS G13D)
LVVAAIDVA

SEQ ID NO: 89705 - protein, 9 aa, synthetic construct
  source 1..9: note = Seed: VVVGAGDVG (KRAS G13D)
LVVAAIDVG

SEQ ID NO: 89706 - protein, 9 aa, synthetic construct
  source 1..9: note = Seed: VVVGAGDVG (KRAS G13D)
LVVAAIDVH

SEQ ID NO: 89707 - protein, 9 aa, synthetic construct
  source 1..9: note = Seed: VVVGAGDVG (KRAS G13D)
LVVAAIDVI

SEQ ID NO: 89708 - protein, 9 aa, synthetic construct
  source 1..9: note = Seed: VVVGAGDVG (KRAS G13D)
LVVAAIDVM

SEQ ID NO: 89709 - protein, 9 aa, synthetic construct
  source 1..9: note = Seed: VVVGAGDVG (KRAS G13D)
LVVAAIDVN

SEQ ID NO: 89710 - protein, 9 aa, synthetic construct
  source 1..9: note = Seed: VVVGAGDVG (KRAS G13D)
LVVAAIDVQ

SEQ ID NO: 89711 - protein, 9 aa, synthetic construct
  source 1..9: note = Seed: VVVGAGDVG (KRAS G13D)
LVVAAIDVS

SEQ ID NO: 89712 - protein, 9 aa, synthetic construct
  source 1..9: note = Seed: VVVGAGDVG (KRAS G13D)
LVVAAIDVT

SEQ ID NO: 89713 - protein, 9 aa, synthetic construct
  source 1..9: note = Seed: VVVGAGDVG (KRAS G13D)
LVVAAIDVV

SEQ ID NO: 89714 - protein, 9 aa, synthetic construct
  source 1..9: note = Seed: VVVGAGDVG (KRAS G13D)
LVVAAKDVA

SEQ ID NO: 89715 - protein, 9 aa, synthetic construct
  source 1..9: note = Seed: VVVGAGDVG (KRAS G13D)
LVVAALDVA

SEQ ID NO: 89716 - protein, 9 aa, synthetic construct
  source 1..9: note = Seed: VVVGAGDVG (KRAS G13D)
LVVAALDVG

SEQ ID NO: 89717 - protein, 9 aa, synthetic construct
  source 1..9: note = Seed: VVVGAGDVG (KRAS G13D)
LVVAALDVM

SEQ ID NO: 89718 - protein, 9 aa, synthetic construct
  source 1..9: note = Seed: VVVGAGDVG (KRAS G13D)
LVVAALDVS

SEQ ID NO: 89719 - protein, 9 aa, synthetic construct
  source 1..9: note = Seed: VVVGAGDVG (KRAS G13D)
LVVAALDVY

SEQ ID NO: 89720 - protein, 9 aa, synthetic construct
  source 1..9: note = Seed: VVVGAGDVG (KRAS G13D)
LVVAAMDVS

SEQ ID NO: 89721 - protein, 9 aa, synthetic construct
  source 1..9: note = Seed: VVVGAGDVG (KRAS G13D)
LVVAANDVA

SEQ ID NO: 89722 - protein, 9 aa, synthetic construct
  source 1..9: note = Seed: VVVGAGDVG (KRAS G13D)
LVVAANDVC

SEQ ID NO: 89723 - protein, 9 aa, synthetic construct
  source 1..9: note = Seed: VVVGAGDVG (KRAS G13D)
LVVAANDVD

SEQ ID NO: 89724 - protein, 9 aa, synthetic construct
  source 1..9: note = Seed: VVVGAGDVG (KRAS G13D)
LVVAANDVE

SEQ ID NO: 89725 - protein, 9 aa, synthetic construct
  source 1..9: note = Seed: VVVGAGDVG (KRAS G13D)
LVVAANDVF

SEQ ID NO: 89726 - protein, 9 aa, synthetic construct
  source 1..9: note = Seed: VVVGAGDVG (KRAS G13D)
LVVAANDVG

SEQ ID NO: 89727 - protein, 9 aa, synthetic construct
  source 1..9: note = Seed: VVVGAGDVG (KRAS G13D)
LVVAANDVH

SEQ ID NO: 89728 - protein, 9 aa, synthetic construct
  source 1..9: note = Seed: VVVGAGDVG (KRAS G13D)
LVVAANDVI

SEQ ID NO: 89729 - protein, 9 aa, synthetic construct
  source 1..9: note = Seed: VVVGAGDVG (KRAS G13D)
LVVAANDVK

SEQ ID NO: 89730 - protein, 9 aa, synthetic construct
  source 1..9: note = Seed: VVVGAGDVG (KRAS G13D)
LVVAANDVL

SEQ ID NO: 89731 - protein, 9 aa, synthetic construct
  source 1..9: note = Seed: VVVGAGDVG (KRAS G13D)
LVVAANDVM

SEQ ID NO: 89732 - protein, 9 aa, synthetic construct
  source 1..9: note = Seed: VVVGAGDVG (KRAS G13D)
LVVAANDVN

SEQ ID NO: 89733 - protein, 9 aa, synthetic construct
  source 1..9: note = Seed: VVVGAGDVG (KRAS G13D)
LVVAANDVP

SEQ ID NO: 89734 - protein, 9 aa, synthetic construct
  source 1..9: note = Seed: VVVGAGDVG (KRAS G13D)
LVVAANDVQ

SEQ ID NO: 89735 - protein, 9 aa, synthetic construct
  source 1..9: note = Seed: VVVGAGDVG (KRAS G13D)
LVVAANDVR

SEQ ID NO: 89736 - protein, 9 aa, synthetic construct
  source 1..9: note = Seed: VVVGAGDVG (KRAS G13D)
LVVAANDVS

SEQ ID NO: 89737 - protein, 9 aa, synthetic construct
  source 1..9: note = Seed: VVVGAGDVG (KRAS G13D)
LVVAANDVT

SEQ ID NO: 89738 - protein, 9 aa, synthetic construct
  source 1..9: note = Seed: VVVGAGDVG (KRAS G13D)
LVVAANDVV

SEQ ID NO: 89739 - protein, 9 aa, synthetic construct
  source 1..9: note = Seed: VVVGAGDVG (KRAS G13D)
LVVAANDVY

SEQ ID NO: 89740 - protein, 9 aa, synthetic construct
  source 1..9: note = Seed: VVVGAGDVG (KRAS G13D)
LVVAAPDVA

SEQ ID NO: 89741 - protein, 9 aa, synthetic construct
  source 1..9: note = Seed: VVVGAGDVG (KRAS G13D)
LVVAAPDVC

SEQ ID NO: 89742 - protein, 9 aa, synthetic construct
  source 1..9: note = Seed: VVVGAGDVG (KRAS G13D)
LVVAAPDVD

SEQ ID NO: 89743 - protein, 9 aa, synthetic construct
  source 1..9: note = Seed: VVVGAGDVG (KRAS G13D)
LVVAAPDVE

SEQ ID NO: 89744 - protein, 9 aa, synthetic construct
  source 1..9: note = Seed: VVVGAGDVG (KRAS G13D)
LVVAAPDVG

SEQ ID NO: 89745 - protein, 9 aa, synthetic construct
  source 1..9: note = Seed: VVVGAGDVG (KRAS G13D)
LVVAAPDVH

SEQ ID NO: 89746 - protein, 9 aa, synthetic construct
  source 1..9: note = Seed: VVVGAGDVG (KRAS G13D)
LVVAAPDVI

SEQ ID NO: 89747 - protein, 9 aa, synthetic construct
  source 1..9: note = Seed: VVVGAGDVG (KRAS G13D)
LVVAAPDVL

SEQ ID NO: 89748 - protein, 9 aa, synthetic construct
  source 1..9: note = Seed: VVVGAGDVG (KRAS G13D)
LVVAAPDVM

SEQ ID NO: 89749 - protein, 9 aa, synthetic construct
  source 1..9: note = Seed: VVVGAGDVG (KRAS G13D)
LVVAAPDVN

SEQ ID NO: 89750 - protein, 9 aa, synthetic construct
  source 1..9: note = Seed: VVVGAGDVG (KRAS G13D)
LVVAAPDVP

SEQ ID NO: 89751 - protein, 9 aa, synthetic construct
  source 1..9: note = Seed: VVVGAGDVG (KRAS G13D)
LVVAAPDVQ

SEQ ID NO: 89752 - protein, 9 aa, synthetic construct
  source 1..9: note = Seed: VVVGAGDVG (KRAS G13D)
LVVAAPDVS

SEQ ID NO: 89753 - protein, 9 aa, synthetic construct
  source 1..9: note = Seed: VVVGAGDVG (KRAS G13D)
LVVAAPDVT

SEQ ID NO: 89754 - protein, 9 aa, synthetic construct
  source 1..9: note = Seed: VVVGAGDVG (KRAS G13D)
LVVAAPDVV

SEQ ID NO: 89755 - protein, 9 aa, synthetic construct
  source 1..9: note = Seed: VVVGAGDVG (KRAS G13D)
LVVAAPDVY

SEQ ID NO: 89756 - protein, 9 aa, synthetic construct
  source 1..9: note = Seed: VVVGAGDVG (KRAS G13D)
LVVAAQDVS

SEQ ID NO: 89757 - protein, 9 aa, synthetic construct
  source 1..9: note = Seed: VVVGAGDVG (KRAS G13D)
LVVAASDVA

SEQ ID NO: 89758 - protein, 9 aa, synthetic construct
  source 1..9: note = Seed: VVVGAGDVG (KRAS G13D)
LVVAASDVC

SEQ ID NO: 89759 - protein, 9 aa, synthetic construct
  source 1..9: note = Seed: VVVGAGDVG (KRAS G13D)
LVVAASDVD

SEQ ID NO: 89760 - protein, 9 aa, synthetic construct
  source 1..9: note = Seed: VVVGAGDVG (KRAS G13D)
LVVAASDVE

SEQ ID NO: 89761 - protein, 9 aa, synthetic construct
  source 1..9: note = Seed: VVVGAGDVG (KRAS G13D)
LVVAASDVF

SEQ ID NO: 89762 - protein, 9 aa, synthetic construct
  source 1..9: note = Seed: VVVGAGDVG (KRAS G13D)
LVVAASDVG

SEQ ID NO: 89763 - protein, 9 aa, synthetic construct
  source 1..9: note = Seed: VVVGAGDVG (KRAS G13D)
LVVAASDVH

SEQ ID NO: 89764 - protein, 9 aa, synthetic construct
  source 1..9: note = Seed: VVVGAGDVG (KRAS G13D)
LVVAASDVI

SEQ ID NO: 89765 - protein, 9 aa, synthetic construct
  source 1..9: note = Seed: VVVGAGDVG (KRAS G13D)
LVVAASDVL

SEQ ID NO: 89766 - protein, 9 aa, synthetic construct
  source 1..9: note = Seed: VVVGAGDVG (KRAS G13D)
LVVAASDVM

SEQ ID NO: 89767 - protein, 9 aa, synthetic construct
  source 1..9: note = Seed: VVVGAGDVG (KRAS G13D)
LVVAASDVN

SEQ ID NO: 89768 - protein, 9 aa, synthetic construct
  source 1..9: note = Seed: VVVGAGDVG (KRAS G13D)
LVVAASDVP

SEQ ID NO: 89769 - protein, 9 aa, synthetic construct
  source 1..9: note = Seed: VVVGAGDVG (KRAS G13D)
LVVAASDVQ

SEQ ID NO: 89770 - protein, 9 aa, synthetic construct
  source 1..9: note = Seed: VVVGAGDVG (KRAS G13D)
LVVAASDVS

SEQ ID NO: 89771 - protein, 9 aa, synthetic construct
  source 1..9: note = Seed: VVVGAGDVG (KRAS G13D)
LVVAASDVT

SEQ ID NO: 89772 - protein, 9 aa, synthetic construct
  source 1..9: note = Seed: VVVGAGDVG (KRAS G13D)
LVVAASDVV

SEQ ID NO: 89773 - protein, 9 aa, synthetic construct
  source 1..9: note = Seed: VVVGAGDVG (KRAS G13D)
LVVAATDVA

SEQ ID NO: 89774 - protein, 9 aa, synthetic construct
  source 1..9: note = Seed: VVVGAGDVG (KRAS G13D)
LVVAATDVC

SEQ ID NO: 89775 - protein, 9 aa, synthetic construct
  source 1..9: note = Seed: VVVGAGDVG (KRAS G13D)
LVVAATDVD

SEQ ID NO: 89776 - protein, 9 aa, synthetic construct
  source 1..9: note = Seed: VVVGAGDVG (KRAS G13D)
LVVAATDVE

SEQ ID NO: 89777 - protein, 9 aa, synthetic construct
  source 1..9: note = Seed: VVVGAGDVG (KRAS G13D)
LVVAATDVF

SEQ ID NO: 89778 - protein, 9 aa, synthetic construct
  source 1..9: note = Seed: VVVGAGDVG (KRAS G13D)
LVVAATDVG

SEQ ID NO: 89779 - protein, 9 aa, synthetic construct
  source 1..9: note = Seed: VVVGAGDVG (KRAS G13D)
LVVAATDVH

SEQ ID NO: 89780 - protein, 9 aa, synthetic construct
  source 1..9: note = Seed: VVVGAGDVG (KRAS G13D)
LVVAATDVI

SEQ ID NO: 89781 - protein, 9 aa, synthetic construct
  source 1..9: note = Seed: VVVGAGDVG (KRAS G13D)
LVVAATDVK

SEQ ID NO: 89782 - protein, 9 aa, synthetic construct
  source 1..9: note = Seed: VVVGAGDVG (KRAS G13D)
LVVAATDVL

SEQ ID NO: 89783 - protein, 9 aa, synthetic construct
  source 1..9: note = Seed: VVVGAGDVG (KRAS G13D)
LVVAATDVM

SEQ ID NO: 89784 - protein, 9 aa, synthetic construct
  source 1..9: note = Seed: VVVGAGDVG (KRAS G13D)
LVVAATDVN

SEQ ID NO: 89785 - protein, 9 aa, synthetic construct
  source 1..9: note = Seed: VVVGAGDVG (KRAS G13D)
LVVAATDVP

SEQ ID NO: 89786 - protein, 9 aa, synthetic construct
  source 1..9: note = Seed: VVVGAGDVG (KRAS G13D)
LVVAATDVQ

SEQ ID NO: 89787 - protein, 9 aa, synthetic construct
  source 1..9: note = Seed: VVVGAGDVG (KRAS G13D)
LVVAATDVR

SEQ ID NO: 89788 - protein, 9 aa, synthetic construct
  source 1..9: note = Seed: VVVGAGDVG (KRAS G13D)
LVVAATDVS

SEQ ID NO: 89789 - protein, 9 aa, synthetic construct
  source 1..9: note = Seed: VVVGAGDVG (KRAS G13D)
LVVAATDVT

SEQ ID NO: 89790 - protein, 9 aa, synthetic construct
  source 1..9: note = Seed: VVVGAGDVG (KRAS G13D)
LVVAATDVV

SEQ ID NO: 89791 - protein, 9 aa, synthetic construct
  source 1..9: note = Seed: VVVGAGDVG (KRAS G13D)
LVVAATDVY

SEQ ID NO: 89792 - protein, 9 aa, synthetic construct
  source 1..9: note = Seed: VVVGAGDVG (KRAS G13D)
LVVAAVDVA

SEQ ID NO: 89793 - protein, 9 aa, synthetic construct
  source 1..9: note = Seed: VVVGAGDVG (KRAS G13D)
LVVAAVDVD

SEQ ID NO: 89794 - protein, 9 aa, synthetic construct
  source 1..9: note = Seed: VVVGAGDVG (KRAS G13D)
LVVAAVDVE

SEQ ID NO: 89795 - protein, 9 aa, synthetic construct
  source 1..9: note = Seed: VVVGAGDVG (KRAS G13D)
LVVAAVDVG

SEQ ID NO: 89796 - protein, 9 aa, synthetic construct
  source 1..9: note = Seed: VVVGAGDVG (KRAS G13D)
LVVAAVDVH

SEQ ID NO: 89797 - protein, 9 aa, synthetic construct
  source 1..9: note = Seed: VVVGAGDVG (KRAS G13D)
LVVAAVDVI

SEQ ID NO: 89798 - protein, 9 aa, synthetic construct
  source 1..9: note = Seed: VVVGAGDVG (KRAS G13D)
LVVAAVDVK

SEQ ID NO: 89799 - protein, 9 aa, synthetic construct
  source 1..9: note = Seed: VVVGAGDVG (KRAS G13D)
LVVAAVDVL

SEQ ID NO: 89800 - protein, 9 aa, synthetic construct
  source 1..9: note = Seed: VVVGAGDVG (KRAS G13D)
LVVAAVDVM

SEQ ID NO: 89801 - protein, 9 aa, synthetic construct
  source 1..9: note = Seed: VVVGAGDVG (KRAS G13D)
LVVAAVDVN

SEQ ID NO: 89802 - protein, 9 aa, synthetic construct
  source 1..9: note = Seed: VVVGAGDVG (KRAS G13D)
LVVAAVDVQ

SEQ ID NO: 89803 - protein, 9 aa, synthetic construct
  source 1..9: note = Seed: VVVGAGDVG (KRAS G13D)
LVVAAVDVS

SEQ ID NO: 89804 - protein, 9 aa, synthetic construct
  source 1..9: note = Seed: VVVGAGDVG (KRAS G13D)
LVVAAVDVT

SEQ ID NO: 89805 - protein, 9 aa, synthetic construct
  source 1..9: note = Seed: VVVGAGDVG (KRAS G13D)
LVVAAVDVV

SEQ ID NO: 89806 - protein, 9 aa, synthetic construct
  source 1..9: note = Seed: VVVGAGDVG (KRAS G13D)
LVVAAVDVY

SEQ ID NO: 89807 - protein, 9 aa, synthetic construct
  source 1..9: note = Seed: VVVGAGDVG (KRAS G13D)
LVVAAYDVA

SEQ ID NO: 89808 - protein, 9 aa, synthetic construct
  source 1..9: note = Seed: VVVGAGDVG (KRAS G13D)
LVVCAADVA

SEQ ID NO: 89809 - protein, 9 aa, synthetic construct
  source 1..9: note = Seed: VVVGAGDVG (KRAS G13D)
LVVCAADVH

SEQ ID NO: 89810 - protein, 9 aa, synthetic construct
  source 1..9: note = Seed: VVVGAGDVG (KRAS G13D)
LVVCAADVN

SEQ ID NO: 89811 - protein, 9 aa, synthetic construct
  source 1..9: note = Seed: VVVGAGDVG (KRAS G13D)
LVVCAADVQ

SEQ ID NO: 89812 - protein, 9 aa, synthetic construct
  source 1..9: note = Seed: VVVGAGDVG (KRAS G13D)
LVVCAADVS

SEQ ID NO: 89813 - protein, 9 aa, synthetic construct
  source 1..9: note = Seed: VVVGAGDVG (KRAS G13D)
LVVCAIDVA

SEQ ID NO: 89814 - protein, 9 aa, synthetic construct
  source 1..9: note = Seed: VVVGAGDVG (KRAS G13D)
LVVCALDVA

SEQ ID NO: 89815 - protein, 9 aa, synthetic construct
  source 1..9: note = Seed: VVVGAGDVG (KRAS G13D)
LVVCAMDVA

SEQ ID NO: 89816 - protein, 9 aa, synthetic construct
  source 1..9: note = Seed: VVVGAGDVG (KRAS G13D)
LVVCANDVA

SEQ ID NO: 89817 - protein, 9 aa, synthetic construct
  source 1..9: note = Seed: VVVGAGDVG (KRAS G13D)
LVVCANDVG

SEQ ID NO: 89818 - protein, 9 aa, synthetic construct
  source 1..9: note = Seed: VVVGAGDVG (KRAS G13D)
LVVCANDVH

SEQ ID NO: 89819 - protein, 9 aa, synthetic construct
  source 1..9: note = Seed: VVVGAGDVG (KRAS G13D)
LVVCANDVN

SEQ ID NO: 89820 - protein, 9 aa, synthetic construct
  source 1..9: note = Seed: VVVGAGDVG (KRAS G13D)
LVVCANDVQ

SEQ ID NO: 89821 - protein, 9 aa, synthetic construct
  source 1..9: note = Seed: VVVGAGDVG (KRAS G13D)
LVVCANDVS

SEQ ID NO: 89822 - protein, 9 aa, synthetic construct
  source 1..9: note = Seed: VVVGAGDVG (KRAS G13D)
LVVCAPDVA

SEQ ID NO: 89823 - protein, 9 aa, synthetic construct
  source 1..9: note = Seed: VVVGAGDVG (KRAS G13D)
LVVCASDVA

SEQ ID NO: 89824 - protein, 9 aa, synthetic construct
  source 1..9: note = Seed: VVVGAGDVG (KRAS G13D)
LVVCASDVS

SEQ ID NO: 89825 - protein, 9 aa, synthetic construct
  source 1..9: note = Seed: VVVGAGDVG (KRAS G13D)
LVVCATDVA

SEQ ID NO: 89826 - protein, 9 aa, synthetic construct
  source 1..9: note = Seed: VVVGAGDVG (KRAS G13D)
LVVCATDVS

SEQ ID NO: 89827 - protein, 9 aa, synthetic construct
  source 1..9: note = Seed: VVVGAGDVG (KRAS G13D)
LVVCAVDVA

SEQ ID NO: 89828 - protein, 9 aa, synthetic construct
  source 1..9: note = Seed: VVVGAGDVG (KRAS G13D)
LVVDAADVA

SEQ ID NO: 89829 - protein, 9 aa, synthetic construct
  source 1..9: note = Seed: VVVGAGDVG (KRAS G13D)
LVVDAADVG

SEQ ID NO: 89830 - protein, 9 aa, synthetic construct
  source 1..9: note = Seed: VVVGAGDVG (KRAS G13D)
LVVDAADVL

SEQ ID NO: 89831 - protein, 9 aa, synthetic construct
  source 1..9: note = Seed: VVVGAGDVG (KRAS G13D)
LVVDAADVM

SEQ ID NO: 89832 - protein, 9 aa, synthetic construct
  source 1..9: note = Seed: VVVGAGDVG (KRAS G13D)
LVVDAADVN

SEQ ID NO: 89833 - protein, 9 aa, synthetic construct
  source 1..9: note = Seed: VVVGAGDVG (KRAS G13D)
LVVDAADVQ

SEQ ID NO: 89834 - protein, 9 aa, synthetic construct
  source 1..9: note = Seed: VVVGAGDVG (KRAS G13D)
LVVDAADVS

SEQ ID NO: 89835 - protein, 9 aa, synthetic construct
  source 1..9: note = Seed: VVVGAGDVG (KRAS G13D)
LVVDAADVT

SEQ ID NO: 89836 - protein, 9 aa, synthetic construct
  source 1..9: note = Seed: VVVGAGDVG (KRAS G13D)
LVVDAADVV

SEQ ID NO: 89837 - protein, 9 aa, synthetic construct
  source 1..9: note = Seed: VVVGAGDVG (KRAS G13D)
LVVDAIDVL

SEQ ID NO: 89838 - protein, 9 aa, synthetic construct
  source 1..9: note = Seed: VVVGAGDVG (KRAS G13D)
LVVDALDVM

SEQ ID NO: 89839 - protein, 9 aa, synthetic construct
  source 1..9: note = Seed: VVVGAGDVG (KRAS G13D)
LVVDANDVA

SEQ ID NO: 89840 - protein, 9 aa, synthetic construct
  source 1..9: note = Seed: VVVGAGDVG (KRAS G13D)
LVVDANDVS

SEQ ID NO: 89841 - protein, 9 aa, synthetic construct
  source 1..9: note = Seed: VVVGAGDVG (KRAS G13D)
LVVDASDVA

SEQ ID NO: 89842 - protein, 9 aa, synthetic construct
  source 1..9: note = Seed: VVVGAGDVG (KRAS G13D)
LVVDASDVQ

SEQ ID NO: 89843 - protein, 9 aa, synthetic construct
  source 1..9: note = Seed: VVVGAGDVG (KRAS G13D)
LVVDASDVS

SEQ ID NO: 89844 - protein, 9 aa, synthetic construct
  source 1..9: note = Seed: VVVGAGDVG (KRAS G13D)
LVVDASDVV

SEQ ID NO: 89845 - protein, 9 aa, synthetic construct
  source 1..9: note = Seed: VVVGAGDVG (KRAS G13D)
LVVDATDVA

SEQ ID NO: 89846 - protein, 9 aa, synthetic construct
  source 1..9: note = Seed: VVVGAGDVG (KRAS G13D)
LVVDAVDVA

SEQ ID NO: 89847 - protein, 9 aa, synthetic construct
  source 1..9: note = Seed: VVVGAGDVG (KRAS G13D)
LVVEAADVA

SEQ ID NO: 89848 - protein, 9 aa, synthetic construct
  source 1..9: note = Seed: VVVGAGDVG (KRAS G13D)
LVVEAADVD

SEQ ID NO: 89849 - protein, 9 aa, synthetic construct
  source 1..9: note = Seed: VVVGAGDVG (KRAS G13D)
LVVEAADVE

SEQ ID NO: 89850 - protein, 9 aa, synthetic construct
  source 1..9: note = Seed: VVVGAGDVG (KRAS G13D)
LVVEAADVG

SEQ ID NO: 89851 - protein, 9 aa, synthetic construct
  source 1..9: note = Seed: VVVGAGDVG (KRAS G13D)
LVVEAADVH

SEQ ID NO: 89852 - protein, 9 aa, synthetic construct
  source 1..9: note = Seed: VVVGAGDVG (KRAS G13D)
LVVEAADVI

SEQ ID NO: 89853 - protein, 9 aa, synthetic construct
  source 1..9: note = Seed: VVVGAGDVG (KRAS G13D)
LVVEAADVL

SEQ ID NO: 89854 - protein, 9 aa, synthetic construct
  source 1..9: note = Seed: VVVGAGDVG (KRAS G13D)
LVVEAADVM

SEQ ID NO: 89855 - protein, 9 aa, synthetic construct
  source 1..9: note = Seed: VVVGAGDVG (KRAS G13D)
LVVEAADVN

SEQ ID NO: 89856 - protein, 9 aa, synthetic construct
  source 1..9: note = Seed: VVVGAGDVG (KRAS G13D)
LVVEAADVQ

SEQ ID NO: 89857 - protein, 9 aa, synthetic construct
  source 1..9: note = Seed: VVVGAGDVG (KRAS G13D)
LVVEAADVS

SEQ ID NO: 89858 - protein, 9 aa, synthetic construct
  source 1..9: note = Seed: VVVGAGDVG (KRAS G13D)
LVVEAADVT

SEQ ID NO: 89859 - protein, 9 aa, synthetic construct
  source 1..9: note = Seed: VVVGAGDVG (KRAS G13D)
LVVEAADVV

SEQ ID NO: 89860 - protein, 9 aa, synthetic construct
  source 1..9: note = Seed: VVVGAGDVG (KRAS G13D)
LVVEAADVY

SEQ ID NO: 89861 - protein, 9 aa, synthetic construct
  source 1..9: note = Seed: VVVGAGDVG (KRAS G13D)
LVVEAGDVA

SEQ ID NO: 89862 - protein, 9 aa, synthetic construct
  source 1..9: note = Seed: VVVGAGDVG (KRAS G13D)
LVVEAGDVS

SEQ ID NO: 89863 - protein, 9 aa, synthetic construct
  source 1..9: note = Seed: VVVGAGDVG (KRAS G13D)
LVVEAIDVA

SEQ ID NO: 89864 - protein, 9 aa, synthetic construct
  source 1..9: note = Seed: VVVGAGDVG (KRAS G13D)
LVVEAIDVM

SEQ ID NO: 89865 - protein, 9 aa, synthetic construct
  source 1..9: note = Seed: VVVGAGDVG (KRAS G13D)
LVVEAIDVN

SEQ ID NO: 89866 - protein, 9 aa, synthetic construct
  source 1..9: note = Seed: VVVGAGDVG (KRAS G13D)
LVVEAIDVS

SEQ ID NO: 89867 - protein, 9 aa, synthetic construct
  source 1..9: note = Seed: VVVGAGDVG (KRAS G13D)
LVVEAIDVT

SEQ ID NO: 89868 - protein, 9 aa, synthetic construct
  source 1..9: note = Seed: VVVGAGDVG (KRAS G13D)
LVVEANDVA

SEQ ID NO: 89869 - protein, 9 aa, synthetic construct
  source 1..9: note = Seed: VVVGAGDVG (KRAS G13D)
LVVEANDVC

SEQ ID NO: 89870 - protein, 9 aa, synthetic construct
  source 1..9: note = Seed: VVVGAGDVG (KRAS G13D)
LVVEANDVG

SEQ ID NO: 89871 - protein, 9 aa, synthetic construct
  source 1..9: note = Seed: VVVGAGDVG (KRAS G13D)
LVVEANDVI

SEQ ID NO: 89872 - protein, 9 aa, synthetic construct
  source 1..9: note = Seed: VVVGAGDVG (KRAS G13D)
LVVEANDVL

SEQ ID NO: 89873 - protein, 9 aa, synthetic construct
  source 1..9: note = Seed: VVVGAGDVG (KRAS G13D)
LVVEANDVM

SEQ ID NO: 89874 - protein, 9 aa, synthetic construct
  source 1..9: note = Seed: VVVGAGDVG (KRAS G13D)
LVVEANDVN

SEQ ID NO: 89875 - protein, 9 aa, synthetic construct
  source 1..9: note = Seed: VVVGAGDVG (KRAS G13D)
LVVEANDVQ

SEQ ID NO: 89876 - protein, 9 aa, synthetic construct
  source 1..9: note = Seed: VVVGAGDVG (KRAS G13D)
LVVEANDVS

SEQ ID NO: 89877 - protein, 9 aa, synthetic construct
  source 1..9: note = Seed: VVVGAGDVG (KRAS G13D)
LVVEANDVT

SEQ ID NO: 89878 - protein, 9 aa, synthetic construct
  source 1..9: note = Seed: VVVGAGDVG (KRAS G13D)
LVVEANDVV

SEQ ID NO: 89879 - protein, 9 aa, synthetic construct
  source 1..9: note = Seed: VVVGAGDVG (KRAS G13D)
LVVEAPDVA

SEQ ID NO: 89880 - protein, 9 aa, synthetic construct
  source 1..9: note = Seed: VVVGAGDVG (KRAS G13D)
LVVEAPDVS

SEQ ID NO: 89881 - protein, 9 aa, synthetic construct
  source 1..9: note = Seed: VVVGAGDVG (KRAS G13D)
LVVEASDVA

SEQ ID NO: 89882 - protein, 9 aa, synthetic construct
  source 1..9: note = Seed: VVVGAGDVG (KRAS G13D)
LVVEASDVD

SEQ ID NO: 89883 - protein, 9 aa, synthetic construct
  source 1..9: note = Seed: VVVGAGDVG (KRAS G13D)
LVVEASDVE

SEQ ID NO: 89884 - protein, 9 aa, synthetic construct
  source 1..9: note = Seed: VVVGAGDVG (KRAS G13D)
LVVEASDVG

SEQ ID NO: 89885 - protein, 9 aa, synthetic construct
  source 1..9: note = Seed: VVVGAGDVG (KRAS G13D)
LVVEASDVH

SEQ ID NO: 89886 - protein, 9 aa, synthetic construct
  source 1..9: note = Seed: VVVGAGDVG (KRAS G13D)
LVVEASDVI

SEQ ID NO: 89887 - protein, 9 aa, synthetic construct
  source 1..9: note = Seed: VVVGAGDVG (KRAS G13D)
LVVEASDVL

SEQ ID NO: 89888 - protein, 9 aa, synthetic construct
  source 1..9: note = Seed: VVVGAGDVG (KRAS G13D)
LVVEASDVM

SEQ ID NO: 89889 - protein, 9 aa, synthetic construct
  source 1..9: note = Seed: VVVGAGDVG (KRAS G13D)
LVVEASDVN

SEQ ID NO: 89890 - protein, 9 aa, synthetic construct
  source 1..9: note = Seed: VVVGAGDVG (KRAS G13D)
LVVEASDVQ

SEQ ID NO: 89891 - protein, 9 aa, synthetic construct
  source 1..9: note = Seed: VVVGAGDVG (KRAS G13D)
LVVEASDVS

SEQ ID NO: 89892 - protein, 9 aa, synthetic construct
  source 1..9: note = Seed: VVVGAGDVG (KRAS G13D)
LVVEASDVT

SEQ ID NO: 89893 - protein, 9 aa, synthetic construct
  source 1..9: note = Seed: VVVGAGDVG (KRAS G13D)
LVVEASDVV

SEQ ID NO: 89894 - protein, 9 aa, synthetic construct
  source 1..9: note = Seed: VVVGAGDVG (KRAS G13D)
LVVEATDVA

SEQ ID NO: 89895 - protein, 9 aa, synthetic construct
  source 1..9: note = Seed: VVVGAGDVG (KRAS G13D)
LVVEATDVE

SEQ ID NO: 89896 - protein, 9 aa, synthetic construct
  source 1..9: note = Seed: VVVGAGDVG (KRAS G13D)
LVVEATDVG

SEQ ID NO: 89897 - protein, 9 aa, synthetic construct
  source 1..9: note = Seed: VVVGAGDVG (KRAS G13D)
LVVEATDVH

SEQ ID NO: 89898 - protein, 9 aa, synthetic construct
  source 1..9: note = Seed: VVVGAGDVG (KRAS G13D)
LVVEATDVI

SEQ ID NO: 89899 - protein, 9 aa, synthetic construct
  source 1..9: note = Seed: VVVGAGDVG (KRAS G13D)
LVVEATDVL

SEQ ID NO: 89900 - protein, 9 aa, synthetic construct
  source 1..9: note = Seed: VVVGAGDVG (KRAS G13D)
LVVEATDVM

SEQ ID NO: 89901 - protein, 9 aa, synthetic construct
  source 1..9: note = Seed: VVVGAGDVG (KRAS G13D)
LVVEATDVN

SEQ ID NO: 89902 - protein, 9 aa, synthetic construct
  source 1..9: note = Seed: VVVGAGDVG (KRAS G13D)
LVVEATDVQ

SEQ ID NO: 89903 - protein, 9 aa, synthetic construct
  source 1..9: note = Seed: VVVGAGDVG (KRAS G13D)
LVVEATDVS

SEQ ID NO: 89904 - protein, 9 aa, synthetic construct
  source 1..9: note = Seed: VVVGAGDVG (KRAS G13D)
LVVEATDVT

SEQ ID NO: 89905 - protein, 9 aa, synthetic construct
  source 1..9: note = Seed: VVVGAGDVG (KRAS G13D)
LVVEATDVV

SEQ ID NO: 89906 - protein, 9 aa, synthetic construct
  source 1..9: note = Seed: VVVGAGDVG (KRAS G13D)
LVVEATDVY

SEQ ID NO: 89907 - protein, 9 aa, synthetic construct
  source 1..9: note = Seed: VVVGAGDVG (KRAS G13D)
LVVEAVDVA

SEQ ID NO: 89908 - protein, 9 aa, synthetic construct
  source 1..9: note = Seed: VVVGAGDVG (KRAS G13D)
LVVEAVDVH

SEQ ID NO: 89909 - protein, 9 aa, synthetic construct
  source 1..9: note = Seed: VVVGAGDVG (KRAS G13D)
LVVEAVDVN

SEQ ID NO: 89910 - protein, 9 aa, synthetic construct
  source 1..9: note = Seed: VVVGAGDVG (KRAS G13D)
LVVEAVDVQ

SEQ ID NO: 89911 - protein, 9 aa, synthetic construct
  source 1..9: note = Seed: VVVGAGDVG (KRAS G13D)
LVVEAVDVS

SEQ ID NO: 89912 - protein, 9 aa, synthetic construct
  source 1..9: note = Seed: VVVGAGDVG (KRAS G13D)
LVVEAVDVT

SEQ ID NO: 89913 - protein, 9 aa, synthetic construct
  source 1..9: note = Seed: VVVGAGDVG (KRAS G13D)
LVVFAADVA

SEQ ID NO: 89914 - protein, 9 aa, synthetic construct
  source 1..9: note = Seed: VVVGAGDVG (KRAS G13D)
LVVFAADVF

SEQ ID NO: 89915 - protein, 9 aa, synthetic construct
  source 1..9: note = Seed: VVVGAGDVG (KRAS G13D)
LVVFAADVG

SEQ ID NO: 89916 - protein, 9 aa, synthetic construct
  source 1..9: note = Seed: VVVGAGDVG (KRAS G13D)
LVVFAADVH

SEQ ID NO: 89917 - protein, 9 aa, synthetic construct
  source 1..9: note = Seed: VVVGAGDVG (KRAS G13D)
LVVFAADVI

SEQ ID NO: 89918 - protein, 9 aa, synthetic construct
  source 1..9: note = Seed: VVVGAGDVG (KRAS G13D)
LVVFAADVL

SEQ ID NO: 89919 - protein, 9 aa, synthetic construct
  source 1..9: note = Seed: VVVGAGDVG (KRAS G13D)
LVVFAADVM

SEQ ID NO: 89920 - protein, 9 aa, synthetic construct
  source 1..9: note = Seed: VVVGAGDVG (KRAS G13D)
LVVFAADVN

SEQ ID NO: 89921 - protein, 9 aa, synthetic construct
  source 1..9: note = Seed: VVVGAGDVG (KRAS G13D)
LVVFAADVQ

SEQ ID NO: 89922 - protein, 9 aa, synthetic construct
  source 1..9: note = Seed: VVVGAGDVG (KRAS G13D)
LVVFAADVR

SEQ ID NO: 89923 - protein, 9 aa, synthetic construct
  source 1..9: note = Seed: VVVGAGDVG (KRAS G13D)
LVVFAADVS

SEQ ID NO: 89924 - protein, 9 aa, synthetic construct
  source 1..9: note = Seed: VVVGAGDVG (KRAS G13D)
LVVFAADVT

SEQ ID NO: 89925 - protein, 9 aa, synthetic construct
  source 1..9: note = Seed: VVVGAGDVG (KRAS G13D)
LVVFAADVV

SEQ ID NO: 89926 - protein, 9 aa, synthetic construct
  source 1..9: note = Seed: VVVGAGDVG (KRAS G13D)
LVVFAADVY

SEQ ID NO: 89927 - protein, 9 aa, synthetic construct
  source 1..9: note = Seed: VVVGAGDVG (KRAS G13D)
LVVFADDVA

SEQ ID NO: 89928 - protein, 9 aa, synthetic construct
  source 1..9: note = Seed: VVVGAGDVG (KRAS G13D)
LVVFADDVC

SEQ ID NO: 89929 - protein, 9 aa, synthetic construct
  source 1..9: note = Seed: VVVGAGDVG (KRAS G13D)
LVVFADDVD

SEQ ID NO: 89930 - protein, 9 aa, synthetic construct
  source 1..9: note = Seed: VVVGAGDVG (KRAS G13D)
LVVFADDVE

SEQ ID NO: 89931 - protein, 9 aa, synthetic construct
  source 1..9: note = Seed: VVVGAGDVG (KRAS G13D)
LVVFADDVF

SEQ ID NO: 89932 - protein, 9 aa, synthetic construct
  source 1..9: note = Seed: VVVGAGDVG (KRAS G13D)
LVVFADDVG

SEQ ID NO: 89933 - protein, 9 aa, synthetic construct
  source 1..9: note = Seed: VVVGAGDVG (KRAS G13D)
LVVFADDVH

SEQ ID NO: 89934 - protein, 9 aa, synthetic construct
  source 1..9: note = Seed: VVVGAGDVG (KRAS G13D)
LVVFADDVI

SEQ ID NO: 89935 - protein, 9 aa, synthetic construct
  source 1..9: note = Seed: VVVGAGDVG (KRAS G13D)
LVVFADDVK

SEQ ID NO: 89936 - protein, 9 aa, synthetic construct
  source 1..9: note = Seed: VVVGAGDVG (KRAS G13D)
LVVFADDVL

SEQ ID NO: 89937 - protein, 9 aa, synthetic construct
  source 1..9: note = Seed: VVVGAGDVG (KRAS G13D)
LVVFADDVM

SEQ ID NO: 89938 - protein, 9 aa, synthetic construct
  source 1..9: note = Seed: VVVGAGDVG (KRAS G13D)
LVVFADDVN

SEQ ID NO: 89939 - protein, 9 aa, synthetic construct
  source 1..9: note = Seed: VVVGAGDVG (KRAS G13D)
LVVFADDVP

SEQ ID NO: 89940 - protein, 9 aa, synthetic construct
  source 1..9: note = Seed: VVVGAGDVG (KRAS G13D)
LVVFADDVQ

SEQ ID NO: 89941 - protein, 9 aa, synthetic construct
  source 1..9: note = Seed: VVVGAGDVG (KRAS G13D)
LVVFADDVR

SEQ ID NO: 89942 - protein, 9 aa, synthetic construct
  source 1..9: note = Seed: VVVGAGDVG (KRAS G13D)
LVVFADDVS

SEQ ID NO: 89943 - protein, 9 aa, synthetic construct
  source 1..9: note = Seed: VVVGAGDVG (KRAS G13D)
LVVFADDVT

SEQ ID NO: 89944 - protein, 9 aa, synthetic construct
  source 1..9: note = Seed: VVVGAGDVG (KRAS G13D)
LVVFADDVV

SEQ ID NO: 89945 - protein, 9 aa, synthetic construct
  source 1..9: note = Seed: VVVGAGDVG (KRAS G13D)
LVVFADDVW

SEQ ID NO: 89946 - protein, 9 aa, synthetic construct
  source 1..9: note = Seed: VVVGAGDVG (KRAS G13D)
LVVFADDVY

SEQ ID NO: 89947 - protein, 9 aa, synthetic construct
  source 1..9: note = Seed: VVVGAGDVG (KRAS G13D)
LVVFAEDVA

SEQ ID NO: 89948 - protein, 9 aa, synthetic construct
  source 1..9: note = Seed: VVVGAGDVG (KRAS G13D)
LVVFAEDVI

SEQ ID NO: 89949 - protein, 9 aa, synthetic construct
  source 1..9: note = Seed: VVVGAGDVG (KRAS G13D)
LVVFAGDVA

SEQ ID NO: 89950 - protein, 9 aa, synthetic construct
  source 1..9: note = Seed: VVVGAGDVG (KRAS G13D)
LVVFAGDVI

SEQ ID NO: 89951 - protein, 9 aa, synthetic construct
  source 1..9: note = Seed: VVVGAGDVG (KRAS G13D)
LVVFAGDVV

SEQ ID NO: 89952 - protein, 9 aa, synthetic construct
  source 1..9: note = Seed: VVVGAGDVG (KRAS G13D)
LVVFAHDVA

SEQ ID NO: 89953 - protein, 9 aa, synthetic construct
  source 1..9: note = Seed: VVVGAGDVG (KRAS G13D)
LVVFAHDVI

SEQ ID NO: 89954 - protein, 9 aa, synthetic construct
  source 1..9: note = Seed: VVVGAGDVG (KRAS G13D)
LVVFAHDVL

SEQ ID NO: 89955 - protein, 9 aa, synthetic construct
  source 1..9: note = Seed: VVVGAGDVG (KRAS G13D)
LVVFAHDVM

SEQ ID NO: 89956 - protein, 9 aa, synthetic construct
  source 1..9: note = Seed: VVVGAGDVG (KRAS G13D)
LVVFAHDVS

SEQ ID NO: 89957 - protein, 9 aa, synthetic construct
  source 1..9: note = Seed: VVVGAGDVG (KRAS G13D)
LVVFAHDVV

SEQ ID NO: 89958 - protein, 9 aa, synthetic construct
  source 1..9: note = Seed: VVVGAGDVG (KRAS G13D)
LVVFAHDVY

SEQ ID NO: 89959 - protein, 9 aa, synthetic construct
  source 1..9: note = Seed: VVVGAGDVG (KRAS G13D)
LVVFAIDVA

SEQ ID NO: 89960 - protein, 9 aa, synthetic construct
  source 1..9: note = Seed: VVVGAGDVG (KRAS G13D)
LVVFAIDVH

SEQ ID NO: 89961 - protein, 9 aa, synthetic construct
  source 1..9: note = Seed: VVVGAGDVG (KRAS G13D)
LVVFAIDVQ

SEQ ID NO: 89962 - protein, 9 aa, synthetic construct
  source 1..9: note = Seed: VVVGAGDVG (KRAS G13D)
LVVFAIDVR

SEQ ID NO: 89963 - protein, 9 aa, synthetic construct
  source 1..9: note = Seed: VVVGAGDVG (KRAS G13D)
LVVFAIDVS

SEQ ID NO: 89964 - protein, 9 aa, synthetic construct
  source 1..9: note = Seed: VVVGAGDVG (KRAS G13D)
LVVFAIDVY

SEQ ID NO: 89965 - protein, 9 aa, synthetic construct
  source 1..9: note = Seed: VVVGAGDVG (KRAS G13D)
LVVFALDVA

SEQ ID NO: 89966 - protein, 9 aa, synthetic construct
  source 1..9: note = Seed: VVVGAGDVG (KRAS G13D)
LVVFAMDVA

SEQ ID NO: 89967 - protein, 9 aa, synthetic construct
  source 1..9: note = Seed: VVVGAGDVG (KRAS G13D)
LVVFAMDVH

SEQ ID NO: 89968 - protein, 9 aa, synthetic construct
  source 1..9: note = Seed: VVVGAGDVG (KRAS G13D)
LVVFAMDVM

SEQ ID NO: 89969 - protein, 9 aa, synthetic construct
  source 1..9: note = Seed: VVVGAGDVG (KRAS G13D)
LVVFAMDVS

SEQ ID NO: 89970 - protein, 9 aa, synthetic construct
  source 1..9: note = Seed: VVVGAGDVG (KRAS G13D)
LVVFAMDVV

SEQ ID NO: 89971 - protein, 9 aa, synthetic construct
  source 1..9: note = Seed: VVVGAGDVG (KRAS G13D)
LVVFAMDVY

SEQ ID NO: 89972 - protein, 9 aa, synthetic construct
  source 1..9: note = Seed: VVVGAGDVG (KRAS G13D)
LVVFANDVA

SEQ ID NO: 89973 - protein, 9 aa, synthetic construct
  source 1..9: note = Seed: VVVGAGDVG (KRAS G13D)
LVVFANDVC

SEQ ID NO: 89974 - protein, 9 aa, synthetic construct
  source 1..9: note = Seed: VVVGAGDVG (KRAS G13D)
LVVFANDVD

SEQ ID NO: 89975 - protein, 9 aa, synthetic construct
  source 1..9: note = Seed: VVVGAGDVG (KRAS G13D)
LVVFANDVE

SEQ ID NO: 89976 - protein, 9 aa, synthetic construct
  source 1..9: note = Seed: VVVGAGDVG (KRAS G13D)
LVVFANDVF

SEQ ID NO: 89977 - protein, 9 aa, synthetic construct
  source 1..9: note = Seed: VVVGAGDVG (KRAS G13D)
LVVFANDVG

SEQ ID NO: 89978 - protein, 9 aa, synthetic construct
  source 1..9: note = Seed: VVVGAGDVG (KRAS G13D)
LVVFANDVH

SEQ ID NO: 89979 - protein, 9 aa, synthetic construct
  source 1..9: note = Seed: VVVGAGDVG (KRAS G13D)
LVVFANDVI

SEQ ID NO: 89980 - protein, 9 aa, synthetic construct
  source 1..9: note = Seed: VVVGAGDVG (KRAS G13D)
LVVFANDVK

SEQ ID NO: 89981 - protein, 9 aa, synthetic construct
  source 1..9: note = Seed: VVVGAGDVG (KRAS G13D)
LVVFANDVL

SEQ ID NO: 89982 - protein, 9 aa, synthetic construct
  source 1..9: note = Seed: VVVGAGDVG (KRAS G13D)
LVVFANDVM

SEQ ID NO: 89983 - protein, 9 aa, synthetic construct
  source 1..9: note = Seed: VVVGAGDVG (KRAS G13D)
LVVFANDVN

SEQ ID NO: 89984 - protein, 9 aa, synthetic construct
  source 1..9: note = Seed: VVVGAGDVG (KRAS G13D)
LVVFANDVP

SEQ ID NO: 89985 - protein, 9 aa, synthetic construct
  source 1..9: note = Seed: VVVGAGDVG (KRAS G13D)
LVVFANDVQ

SEQ ID NO: 89986 - protein, 9 aa, synthetic construct
  source 1..9: note = Seed: VVVGAGDVG (KRAS G13D)
LVVFANDVR

SEQ ID NO: 89987 - protein, 9 aa, synthetic construct
  source 1..9: note = Seed: VVVGAGDVG (KRAS G13D)
LVVFANDVS

SEQ ID NO: 89988 - protein, 9 aa, synthetic construct
  source 1..9: note = Seed: VVVGAGDVG (KRAS G13D)
LVVFANDVT

SEQ ID NO: 89989 - protein, 9 aa, synthetic construct
  source 1..9: note = Seed: VVVGAGDVG (KRAS G13D)
LVVFANDVV

SEQ ID NO: 89990 - protein, 9 aa, synthetic construct
  source 1..9: note = Seed: VVVGAGDVG (KRAS G13D)
LVVFANDVW

SEQ ID NO: 89991 - protein, 9 aa, synthetic construct
  source 1..9: note = Seed: VVVGAGDVG (KRAS G13D)
LVVFANDVY

SEQ ID NO: 89992 - protein, 9 aa, synthetic construct
  source 1..9: note = Seed: VVVGAGDVG (KRAS G13D)
LVVFAPDVA

SEQ ID NO: 89993 - protein, 9 aa, synthetic construct
  source 1..9: note = Seed: VVVGAGDVG (KRAS G13D)
LVVFAPDVC

SEQ ID NO: 89994 - protein, 9 aa, synthetic construct
  source 1..9: note = Seed: VVVGAGDVG (KRAS G13D)
LVVFAPDVD

SEQ ID NO: 89995 - protein, 9 aa, synthetic construct
  source 1..9: note = Seed: VVVGAGDVG (KRAS G13D)
LVVFAPDVE

SEQ ID NO: 89996 - protein, 9 aa, synthetic construct
  source 1..9: note = Seed: VVVGAGDVG (KRAS G13D)
LVVFAPDVF

SEQ ID NO: 89997 - protein, 9 aa, synthetic construct
  source 1..9: note = Seed: VVVGAGDVG (KRAS G13D)
LVVFAPDVG

SEQ ID NO: 89998 - protein, 9 aa, synthetic construct
  source 1..9: note = Seed: VVVGAGDVG (KRAS G13D)
LVVFAPDVH

SEQ ID NO: 89999 - protein, 9 aa, synthetic construct
  source 1..9: note = Seed: VVVGAGDVG (KRAS G13D)
LVVFAPDVI

SEQ ID NO: 90000 - protein, 9 aa, synthetic construct
  source 1..9: note = Seed: VVVGAGDVG (KRAS G13D)
LVVFAPDVK

SEQ ID NO: 90001 - protein, 9 aa, synthetic construct
  source 1..9: note = Seed: VVVGAGDVG (KRAS G13D)
LVVFAPDVL

SEQ ID NO: 90002 - protein, 9 aa, synthetic construct
  source 1..9: note = Seed: VVVGAGDVG (KRAS G13D)
LVVFAPDVM

SEQ ID NO: 90003 - protein, 9 aa, synthetic construct
  source 1..9: note = Seed: VVVGAGDVG (KRAS G13D)
LVVFAPDVN

SEQ ID NO: 90004 - protein, 9 aa, synthetic construct
  source 1..9: note = Seed: VVVGAGDVG (KRAS G13D)
LVVFAPDVP

SEQ ID NO: 90005 - protein, 9 aa, synthetic construct
  source 1..9: note = Seed: VVVGAGDVG (KRAS G13D)
LVVFAPDVQ

SEQ ID NO: 90006 - protein, 9 aa, synthetic construct
  source 1..9: note = Seed: VVVGAGDVG (KRAS G13D)
LVVFAPDVS

SEQ ID NO: 90007 - protein, 9 aa, synthetic construct
  source 1..9: note = Seed: VVVGAGDVG (KRAS G13D)
LVVFAPDVT

SEQ ID NO: 90008 - protein, 9 aa, synthetic construct
  source 1..9: note = Seed: VVVGAGDVG (KRAS G13D)
LVVFAPDVV

SEQ ID NO: 90009 - protein, 9 aa, synthetic construct
  source 1..9: note = Seed: VVVGAGDVG (KRAS G13D)
LVVFAPDVW

SEQ ID NO: 90010 - protein, 9 aa, synthetic construct
  source 1..9: note = Seed: VVVGAGDVG (KRAS G13D)
LVVFAPDVY

SEQ ID NO: 90011 - protein, 9 aa, synthetic construct
  source 1..9: note = Seed: VVVGAGDVG (KRAS G13D)
LVVFAQDVA

SEQ ID NO: 90012 - protein, 9 aa, synthetic construct
  source 1..9: note = Seed: VVVGAGDVG (KRAS G13D)
LVVFAQDVF

SEQ ID NO: 90013 - protein, 9 aa, synthetic construct
  source 1..9: note = Seed: VVVGAGDVG (KRAS G13D)
LVVFAQDVI

SEQ ID NO: 90014 - protein, 9 aa, synthetic construct
  source 1..9: note = Seed: VVVGAGDVG (KRAS G13D)
LVVFAQDVL

SEQ ID NO: 90015 - protein, 9 aa, synthetic construct
  source 1..9: note = Seed: VVVGAGDVG (KRAS G13D)
LVVFAQDVM

SEQ ID NO: 90016 - protein, 9 aa, synthetic construct
  source 1..9: note = Seed: VVVGAGDVG (KRAS G13D)
LVVFAQDVQ

SEQ ID NO: 90017 - protein, 9 aa, synthetic construct
  source 1..9: note = Seed: VVVGAGDVG (KRAS G13D)
LVVFAQDVR

SEQ ID NO: 90018 - protein, 9 aa, synthetic construct
  source 1..9: note = Seed: VVVGAGDVG (KRAS G13D)
LVVFAQDVS

SEQ ID NO: 90019 - protein, 9 aa, synthetic construct
  source 1..9: note = Seed: VVVGAGDVG (KRAS G13D)
LVVFAQDVV

SEQ ID NO: 90020 - protein, 9 aa, synthetic construct
  source 1..9: note = Seed: VVVGAGDVG (KRAS G13D)
LVVFAQDVY

SEQ ID NO: 90021 - protein, 9 aa, synthetic construct
  source 1..9: note = Seed: VVVGAGDVG (KRAS G13D)
LVVFASDVA

SEQ ID NO: 90022 - protein, 9 aa, synthetic construct
  source 1..9: note = Seed: VVVGAGDVG (KRAS G13D)
LVVFASDVE

SEQ ID NO: 90023 - protein, 9 aa, synthetic construct
  source 1..9: note = Seed: VVVGAGDVG (KRAS G13D)
LVVFASDVF

SEQ ID NO: 90024 - protein, 9 aa, synthetic construct
  source 1..9: note = Seed: VVVGAGDVG (KRAS G13D)
LVVFASDVG

SEQ ID NO: 90025 - protein, 9 aa, synthetic construct
  source 1..9: note = Seed: VVVGAGDVG (KRAS G13D)
LVVFASDVH

SEQ ID NO: 90026 - protein, 9 aa, synthetic construct
  source 1..9: note = Seed: VVVGAGDVG (KRAS G13D)
LVVFASDVI

SEQ ID NO: 90027 - protein, 9 aa, synthetic construct
  source 1..9: note = Seed: VVVGAGDVG (KRAS G13D)
LVVFASDVL

SEQ ID NO: 90028 - protein, 9 aa, synthetic construct
  source 1..9: note = Seed: VVVGAGDVG (KRAS G13D)
LVVFASDVM

SEQ ID NO: 90029 - protein, 9 aa, synthetic construct
  source 1..9: note = Seed: VVVGAGDVG (KRAS G13D)
LVVFASDVN

SEQ ID NO: 90030 - protein, 9 aa, synthetic construct
  source 1..9: note = Seed: VVVGAGDVG (KRAS G13D)
LVVFASDVP

SEQ ID NO: 90031 - protein, 9 aa, synthetic construct
  source 1..9: note = Seed: VVVGAGDVG (KRAS G13D)
LVVFASDVQ

SEQ ID NO: 90032 - protein, 9 aa, synthetic construct
  source 1..9: note = Seed: VVVGAGDVG (KRAS G13D)
LVVFASDVR

SEQ ID NO: 90033 - protein, 9 aa, synthetic construct
  source 1..9: note = Seed: VVVGAGDVG (KRAS G13D)
LVVFASDVS

SEQ ID NO: 90034 - protein, 9 aa, synthetic construct
  source 1..9: note = Seed: VVVGAGDVG (KRAS G13D)
LVVFASDVT

SEQ ID NO: 90035 - protein, 9 aa, synthetic construct
  source 1..9: note = Seed: VVVGAGDVG (KRAS G13D)
LVVFASDVV

SEQ ID NO: 90036 - protein, 9 aa, synthetic construct
  source 1..9: note = Seed: VVVGAGDVG (KRAS G13D)
LVVFASDVY

SEQ ID NO: 90037 - protein, 9 aa, synthetic construct
  source 1..9: note = Seed: VVVGAGDVG (KRAS G13D)
LVVFATDVA

SEQ ID NO: 90038 - protein, 9 aa, synthetic construct
  source 1..9: note = Seed: VVVGAGDVG (KRAS G13D)
LVVFATDVF

SEQ ID NO: 90039 - protein, 9 aa, synthetic construct
  source 1..9: note = Seed: VVVGAGDVG (KRAS G13D)
LVVFATDVG

SEQ ID NO: 90040 - protein, 9 aa, synthetic construct
  source 1..9: note = Seed: VVVGAGDVG (KRAS G13D)
LVVFATDVH

SEQ ID NO: 90041 - protein, 9 aa, synthetic construct
  source 1..9: note = Seed: VVVGAGDVG (KRAS G13D)
LVVFATDVI

SEQ ID NO: 90042 - protein, 9 aa, synthetic construct
  source 1..9: note = Seed: VVVGAGDVG (KRAS G13D)
LVVFATDVK

SEQ ID NO: 90043 - protein, 9 aa, synthetic construct
  source 1..9: note = Seed: VVVGAGDVG (KRAS G13D)
LVVFATDVL

SEQ ID NO: 90044 - protein, 9 aa, synthetic construct
  source 1..9: note = Seed: VVVGAGDVG (KRAS G13D)
LVVFATDVM

SEQ ID NO: 90045 - protein, 9 aa, synthetic construct
  source 1..9: note = Seed: VVVGAGDVG (KRAS G13D)
LVVFATDVN

SEQ ID NO: 90046 - protein, 9 aa, synthetic construct
  source 1..9: note = Seed: VVVGAGDVG (KRAS G13D)
LVVFATDVP

SEQ ID NO: 90047 - protein, 9 aa, synthetic construct
  source 1..9: note = Seed: VVVGAGDVG (KRAS G13D)
LVVFATDVQ

SEQ ID NO: 90048 - protein, 9 aa, synthetic construct
  source 1..9: note = Seed: VVVGAGDVG (KRAS G13D)
LVVFATDVR

SEQ ID NO: 90049 - protein, 9 aa, synthetic construct
  source 1..9: note = Seed: VVVGAGDVG (KRAS G13D)
LVVFATDVS

SEQ ID NO: 90050 - protein, 9 aa, synthetic construct
  source 1..9: note = Seed: VVVGAGDVG (KRAS G13D)
LVVFATDVT

SEQ ID NO: 90051 - protein, 9 aa, synthetic construct
  source 1..9: note = Seed: VVVGAGDVG (KRAS G13D)
LVVFATDVV

SEQ ID NO: 90052 - protein, 9 aa, synthetic construct
  source 1..9: note = Seed: VVVGAGDVG (KRAS G13D)
LVVFATDVY

SEQ ID NO: 90053 - protein, 9 aa, synthetic construct
  source 1..9: note = Seed: VVVGAGDVG (KRAS G13D)
LVVFAVDVA

SEQ ID NO: 90054 - protein, 9 aa, synthetic construct
  source 1..9: note = Seed: VVVGAGDVG (KRAS G13D)
LVVFAVDVH

SEQ ID NO: 90055 - protein, 9 aa, synthetic construct
  source 1..9: note = Seed: VVVGAGDVG (KRAS G13D)
LVVFAVDVN

SEQ ID NO: 90056 - protein, 9 aa, synthetic construct
  source 1..9: note = Seed: VVVGAGDVG (KRAS G13D)
LVVFAVDVS

SEQ ID NO: 90057 - protein, 9 aa, synthetic construct
  source 1..9: note = Seed: VVVGAGDVG (KRAS G13D)
LVVFAVDVY

SEQ ID NO: 90058 - protein, 9 aa, synthetic construct
  source 1..9: note = Seed: VVVGAGDVG (KRAS G13D)
LVVGAADVA

SEQ ID NO: 90059 - protein, 9 aa, synthetic construct
  source 1..9: note = Seed: VVVGAGDVG (KRAS G13D)
LVVGAADVD

SEQ ID NO: 90060 - protein, 9 aa, synthetic construct
  source 1..9: note = Seed: VVVGAGDVG (KRAS G13D)
LVVGAADVE

SEQ ID NO: 90061 - protein, 9 aa, synthetic construct
  source 1..9: note = Seed: VVVGAGDVG (KRAS G13D)
LVVGAADVG

SEQ ID NO: 90062 - protein, 9 aa, synthetic construct
  source 1..9: note = Seed: VVVGAGDVG (KRAS G13D)
LVVGAADVH

SEQ ID NO: 90063 - protein, 9 aa, synthetic construct
  source 1..9: note = Seed: VVVGAGDVG (KRAS G13D)
LVVGAADVI

SEQ ID NO: 90064 - protein, 9 aa, synthetic construct
  source 1..9: note = Seed: VVVGAGDVG (KRAS G13D)
LVVGAADVL

SEQ ID NO: 90065 - protein, 9 aa, synthetic construct
  source 1..9: note = Seed: VVVGAGDVG (KRAS G13D)
LVVGAADVM

SEQ ID NO: 90066 - protein, 9 aa, synthetic construct
  source 1..9: note = Seed: VVVGAGDVG (KRAS G13D)
LVVGAADVN

SEQ ID NO: 90067 - protein, 9 aa, synthetic construct
  source 1..9: note = Seed: VVVGAGDVG (KRAS G13D)
LVVGAADVQ

SEQ ID NO: 90068 - protein, 9 aa, synthetic construct
  source 1..9: note = Seed: VVVGAGDVG (KRAS G13D)
LVVGAADVS

SEQ ID NO: 90069 - protein, 9 aa, synthetic construct
  source 1..9: note = Seed: VVVGAGDVG (KRAS G13D)
LVVGAADVT

SEQ ID NO: 90070 - protein, 9 aa, synthetic construct
  source 1..9: note = Seed: VVVGAGDVG (KRAS G13D)
LVVGAADVV

SEQ ID NO: 90071 - protein, 9 aa, synthetic construct
  source 1..9: note = Seed: VVVGAGDVG (KRAS G13D)
LVVGADDVI

SEQ ID NO: 90072 - protein, 9 aa, synthetic construct
  source 1..9: note = Seed: VVVGAGDVG (KRAS G13D)
LVVGADDVL

SEQ ID NO: 90073 - protein, 9 aa, synthetic construct
  source 1..9: note = Seed: VVVGAGDVG (KRAS G13D)
LVVGAIDVA

SEQ ID NO: 90074 - protein, 9 aa, synthetic construct
  source 1..9: note = Seed: VVVGAGDVG (KRAS G13D)
LVVGAIDVI

SEQ ID NO: 90075 - protein, 9 aa, synthetic construct
  source 1..9: note = Seed: VVVGAGDVG (KRAS G13D)
LVVGAIDVL

SEQ ID NO: 90076 - protein, 9 aa, synthetic construct
  source 1..9: note = Seed: VVVGAGDVG (KRAS G13D)
LVVGAIDVM

SEQ ID NO: 90077 - protein, 9 aa, synthetic construct
  source 1..9: note = Seed: VVVGAGDVG (KRAS G13D)
LVVGAIDVN

SEQ ID NO: 90078 - protein, 9 aa, synthetic construct
  source 1..9: note = Seed: VVVGAGDVG (KRAS G13D)
LVVGAIDVQ

SEQ ID NO: 90079 - protein, 9 aa, synthetic construct
  source 1..9: note = Seed: VVVGAGDVG (KRAS G13D)
LVVGAIDVS

SEQ ID NO: 90080 - protein, 9 aa, synthetic construct
  source 1..9: note = Seed: VVVGAGDVG (KRAS G13D)
LVVGAIDVV

SEQ ID NO: 90081 - protein, 9 aa, synthetic construct
  source 1..9: note = Seed: VVVGAGDVG (KRAS G13D)
LVVGALDVA

SEQ ID NO: 90082 - protein, 9 aa, synthetic construct
  source 1..9: note = Seed: VVVGAGDVG (KRAS G13D)
LVVGALDVI

SEQ ID NO: 90083 - protein, 9 aa, synthetic construct
  source 1..9: note = Seed: VVVGAGDVG (KRAS G13D)
LVVGALDVL

SEQ ID NO: 90084 - protein, 9 aa, synthetic construct
  source 1..9: note = Seed: VVVGAGDVG (KRAS G13D)
LVVGALDVM

SEQ ID NO: 90085 - protein, 9 aa, synthetic construct
  source 1..9: note = Seed: VVVGAGDVG (KRAS G13D)
LVVGALDVV

SEQ ID NO: 90086 - protein, 9 aa, synthetic construct
  source 1..9: note = Seed: VVVGAGDVG (KRAS G13D)
LVVGAMDVM

SEQ ID NO: 90087 - protein, 9 aa, synthetic construct
  source 1..9: note = Seed: VVVGAGDVG (KRAS G13D)
LVVGAMDVV

SEQ ID NO: 90088 - protein, 9 aa, synthetic construct
  source 1..9: note = Seed: VVVGAGDVG (KRAS G13D)
LVVGANDVA

SEQ ID NO: 90089 - protein, 9 aa, synthetic construct
  source 1..9: note = Seed: VVVGAGDVG (KRAS G13D)
LVVGANDVC

SEQ ID NO: 90090 - protein, 9 aa, synthetic construct
  source 1..9: note = Seed: VVVGAGDVG (KRAS G13D)
LVVGANDVG

SEQ ID NO: 90091 - protein, 9 aa, synthetic construct
  source 1..9: note = Seed: VVVGAGDVG (KRAS G13D)
LVVGANDVL

SEQ ID NO: 90092 - protein, 9 aa, synthetic construct
  source 1..9: note = Seed: VVVGAGDVG (KRAS G13D)
LVVGANDVM

SEQ ID NO: 90093 - protein, 9 aa, synthetic construct
  source 1..9: note = Seed: VVVGAGDVG (KRAS G13D)
LVVGANDVN

SEQ ID NO: 90094 - protein, 9 aa, synthetic construct
  source 1..9: note = Seed: VVVGAGDVG (KRAS G13D)
LVVGANDVQ

SEQ ID NO: 90095 - protein, 9 aa, synthetic construct
  source 1..9: note = Seed: VVVGAGDVG (KRAS G13D)
LVVGANDVS

SEQ ID NO: 90096 - protein, 9 aa, synthetic construct
  source 1..9: note = Seed: VVVGAGDVG (KRAS G13D)
LVVGANDVT

SEQ ID NO: 90097 - protein, 9 aa, synthetic construct
  source 1..9: note = Seed: VVVGAGDVG (KRAS G13D)
LVVGANDVV

SEQ ID NO: 90098 - protein, 9 aa, synthetic construct
  source 1..9: note = Seed: VVVGAGDVG (KRAS G13D)
LVVGAPDVA

SEQ ID NO: 90099 - protein, 9 aa, synthetic construct
  source 1..9: note = Seed: VVVGAGDVG (KRAS G13D)
LVVGASDVA

SEQ ID NO: 90100 - protein, 9 aa, synthetic construct
  source 1..9: note = Seed: VVVGAGDVG (KRAS G13D)
LVVGASDVD

SEQ ID NO: 90101 - protein, 9 aa, synthetic construct
  source 1..9: note = Seed: VVVGAGDVG (KRAS G13D)
LVVGASDVG

SEQ ID NO: 90102 - protein, 9 aa, synthetic construct
  source 1..9: note = Seed: VVVGAGDVG (KRAS G13D)
LVVGASDVH

SEQ ID NO: 90103 - protein, 9 aa, synthetic construct
  source 1..9: note = Seed: VVVGAGDVG (KRAS G13D)
LVVGASDVI

SEQ ID NO: 90104 - protein, 9 aa, synthetic construct
  source 1..9: note = Seed: VVVGAGDVG (KRAS G13D)
LVVGASDVL

SEQ ID NO: 90105 - protein, 9 aa, synthetic construct
  source 1..9: note = Seed: VVVGAGDVG (KRAS G13D)
LVVGASDVM

SEQ ID NO: 90106 - protein, 9 aa, synthetic construct
  source 1..9: note = Seed: VVVGAGDVG (KRAS G13D)
LVVGASDVN

SEQ ID NO: 90107 - protein, 9 aa, synthetic construct
  source 1..9: note = Seed: VVVGAGDVG (KRAS G13D)
LVVGASDVQ

SEQ ID NO: 90108 - protein, 9 aa, synthetic construct
  source 1..9: note = Seed: VVVGAGDVG (KRAS G13D)
LVVGASDVS

SEQ ID NO: 90109 - protein, 9 aa, synthetic construct
  source 1..9: note = Seed: VVVGAGDVG (KRAS G13D)
LVVGASDVT

SEQ ID NO: 90110 - protein, 9 aa, synthetic construct
  source 1..9: note = Seed: VVVGAGDVG (KRAS G13D)
LVVGASDVV

SEQ ID NO: 90111 - protein, 9 aa, synthetic construct
  source 1..9: note = Seed: VVVGAGDVG (KRAS G13D)
LVVGATDVA

SEQ ID NO: 90112 - protein, 9 aa, synthetic construct
  source 1..9: note = Seed: VVVGAGDVG (KRAS G13D)
LVVGATDVH

SEQ ID NO: 90113 - protein, 9 aa, synthetic construct
  source 1..9: note = Seed: VVVGAGDVG (KRAS G13D)
LVVGATDVM

SEQ ID NO: 90114 - protein, 9 aa, synthetic construct
  source 1..9: note = Seed: VVVGAGDVG (KRAS G13D)
LVVGATDVN

SEQ ID NO: 90115 - protein, 9 aa, synthetic construct
  source 1..9: note = Seed: VVVGAGDVG (KRAS G13D)
LVVGATDVQ

SEQ ID NO: 90116 - protein, 9 aa, synthetic construct
  source 1..9: note = Seed: VVVGAGDVG (KRAS G13D)
LVVGATDVS

SEQ ID NO: 90117 - protein, 9 aa, synthetic construct
  source 1..9: note = Seed: VVVGAGDVG (KRAS G13D)
LVVGATDVT

SEQ ID NO: 90118 - protein, 9 aa, synthetic construct
  source 1..9: note = Seed: VVVGAGDVG (KRAS G13D)
LVVGATDVV

SEQ ID NO: 90119 - protein, 9 aa, synthetic construct
  source 1..9: note = Seed: VVVGAGDVG (KRAS G13D)
LVVGAVDVA

SEQ ID NO: 90120 - protein, 9 aa, synthetic construct
  source 1..9: note = Seed: VVVGAGDVG (KRAS G13D)
LVVGAVDVH

SEQ ID NO: 90121 - protein, 9 aa, synthetic construct
  source 1..9: note = Seed: VVVGAGDVG (KRAS G13D)
LVVGAVDVI

SEQ ID NO: 90122 - protein, 9 aa, synthetic construct
  source 1..9: note = Seed: VVVGAGDVG (KRAS G13D)
LVVGAVDVL

SEQ ID NO: 90123 - protein, 9 aa, synthetic construct
  source 1..9: note = Seed: VVVGAGDVG (KRAS G13D)
LVVGAVDVM

SEQ ID NO: 90124 - protein, 9 aa, synthetic construct
  source 1..9: note = Seed: VVVGAGDVG (KRAS G13D)
LVVGAVDVN

SEQ ID NO: 90125 - protein, 9 aa, synthetic construct
  source 1..9: note = Seed: VVVGAGDVG (KRAS G13D)
LVVGAVDVQ

SEQ ID NO: 90126 - protein, 9 aa, synthetic construct
  source 1..9: note = Seed: VVVGAGDVG (KRAS G13D)
LVVGAVDVS

SEQ ID NO: 90127 - protein, 9 aa, synthetic construct
  source 1..9: note = Seed: VVVGAGDVG (KRAS G13D)
LVVGAVDVV

SEQ ID NO: 90128 - protein, 9 aa, synthetic construct
  source 1..9: note = Seed: VVVGAGDVG (KRAS G13D)
LVVHAADVA

SEQ ID NO: 90129 - protein, 9 aa, synthetic construct
  source 1..9: note = Seed: VVVGAGDVG (KRAS G13D)
LVVHAADVC

SEQ ID NO: 90130 - protein, 9 aa, synthetic construct
  source 1..9: note = Seed: VVVGAGDVG (KRAS G13D)
LVVHAADVF

SEQ ID NO: 90131 - protein, 9 aa, synthetic construct
  source 1..9: note = Seed: VVVGAGDVG (KRAS G13D)
LVVHAADVG

SEQ ID NO: 90132 - protein, 9 aa, synthetic construct
  source 1..9: note = Seed: VVVGAGDVG (KRAS G13D)
LVVHAADVI

SEQ ID NO: 90133 - protein, 9 aa, synthetic construct
  source 1..9: note = Seed: VVVGAGDVG (KRAS G13D)
LVVHAADVL

SEQ ID NO: 90134 - protein, 9 aa, synthetic construct
  source 1..9: note = Seed: VVVGAGDVG (KRAS G13D)
LVVHAADVM

SEQ ID NO: 90135 - protein, 9 aa, synthetic construct
  source 1..9: note = Seed: VVVGAGDVG (KRAS G13D)
LVVHAADVN

SEQ ID NO: 90136 - protein, 9 aa, synthetic construct
  source 1..9: note = Seed: VVVGAGDVG (KRAS G13D)
LVVHAADVS

SEQ ID NO: 90137 - protein, 9 aa, synthetic construct
  source 1..9: note = Seed: VVVGAGDVG (KRAS G13D)
LVVHAADVV

SEQ ID NO: 90138 - protein, 9 aa, synthetic construct
  source 1..9: note = Seed: VVVGAGDVG (KRAS G13D)
LVVHAADVY

SEQ ID NO: 90139 - protein, 9 aa, synthetic construct
  source 1..9: note = Seed: VVVGAGDVG (KRAS G13D)
LVVHADDVA

SEQ ID NO: 90140 - protein, 9 aa, synthetic construct
  source 1..9: note = Seed: VVVGAGDVG (KRAS G13D)
LVVHADDVF

SEQ ID NO: 90141 - protein, 9 aa, synthetic construct
  source 1..9: note = Seed: VVVGAGDVG (KRAS G13D)
LVVHADDVI

SEQ ID NO: 90142 - protein, 9 aa, synthetic construct
  source 1..9: note = Seed: VVVGAGDVG (KRAS G13D)
LVVHADDVL

SEQ ID NO: 90143 - protein, 9 aa, synthetic construct
  source 1..9: note = Seed: VVVGAGDVG (KRAS G13D)
LVVHADDVM

SEQ ID NO: 90144 - protein, 9 aa, synthetic construct
  source 1..9: note = Seed: VVVGAGDVG (KRAS G13D)
LVVHADDVV

SEQ ID NO: 90145 - protein, 9 aa, synthetic construct
  source 1..9: note = Seed: VVVGAGDVG (KRAS G13D)
LVVHAGDVA

SEQ ID NO: 90146 - protein, 9 aa, synthetic construct
  source 1..9: note = Seed: VVVGAGDVG (KRAS G13D)
LVVHAIDVA

SEQ ID NO: 90147 - protein, 9 aa, synthetic construct
  source 1..9: note = Seed: VVVGAGDVG (KRAS G13D)
LVVHAIDVF

SEQ ID NO: 90148 - protein, 9 aa, synthetic construct
  source 1..9: note = Seed: VVVGAGDVG (KRAS G13D)
LVVHAIDVG

SEQ ID NO: 90149 - protein, 9 aa, synthetic construct
  source 1..9: note = Seed: VVVGAGDVG (KRAS G13D)
LVVHAIDVI

SEQ ID NO: 90150 - protein, 9 aa, synthetic construct
  source 1..9: note = Seed: VVVGAGDVG (KRAS G13D)
LVVHAIDVM

SEQ ID NO: 90151 - protein, 9 aa, synthetic construct
  source 1..9: note = Seed: VVVGAGDVG (KRAS G13D)
LVVHAIDVS

SEQ ID NO: 90152 - protein, 9 aa, synthetic construct
  source 1..9: note = Seed: VVVGAGDVG (KRAS G13D)
LVVHAIDVV

SEQ ID NO: 90153 - protein, 9 aa, synthetic construct
  source 1..9: note = Seed: VVVGAGDVG (KRAS G13D)
LVVHALDVA

SEQ ID NO: 90154 - protein, 9 aa, synthetic construct
  source 1..9: note = Seed: VVVGAGDVG (KRAS G13D)
LVVHALDVI

SEQ ID NO: 90155 - protein, 9 aa, synthetic construct
  source 1..9: note = Seed: VVVGAGDVG (KRAS G13D)
LVVHALDVL

SEQ ID NO: 90156 - protein, 9 aa, synthetic construct
  source 1..9: note = Seed: VVVGAGDVG (KRAS G13D)
LVVHALDVM

SEQ ID NO: 90157 - protein, 9 aa, synthetic construct
  source 1..9: note = Seed: VVVGAGDVG (KRAS G13D)
LVVHALDVQ

SEQ ID NO: 90158 - protein, 9 aa, synthetic construct
  source 1..9: note = Seed: VVVGAGDVG (KRAS G13D)
LVVHALDVS

SEQ ID NO: 90159 - protein, 9 aa, synthetic construct
  source 1..9: note = Seed: VVVGAGDVG (KRAS G13D)
LVVHALDVV

SEQ ID NO: 90160 - protein, 9 aa, synthetic construct
  source 1..9: note = Seed: VVVGAGDVG (KRAS G13D)
LVVHAMDVI

SEQ ID NO: 90161 - protein, 9 aa, synthetic construct
  source 1..9: note = Seed: VVVGAGDVG (KRAS G13D)
LVVHAMDVL

SEQ ID NO: 90162 - protein, 9 aa, synthetic construct
  source 1..9: note = Seed: VVVGAGDVG (KRAS G13D)
LVVHAMDVS

SEQ ID NO: 90163 - protein, 9 aa, synthetic construct
  source 1..9: note = Seed: VVVGAGDVG (KRAS G13D)
LVVHAMDVV

SEQ ID NO: 90164 - protein, 9 aa, synthetic construct
  source 1..9: note = Seed: VVVGAGDVG (KRAS G13D)
LVVHANDVA

SEQ ID NO: 90165 - protein, 9 aa, synthetic construct
  source 1..9: note = Seed: VVVGAGDVG (KRAS G13D)
LVVHANDVI

SEQ ID NO: 90166 - protein, 9 aa, synthetic construct
  source 1..9: note = Seed: VVVGAGDVG (KRAS G13D)
LVVHANDVL

SEQ ID NO: 90167 - protein, 9 aa, synthetic construct
  source 1..9: note = Seed: VVVGAGDVG (KRAS G13D)
LVVHANDVS

SEQ ID NO: 90168 - protein, 9 aa, synthetic construct
  source 1..9: note = Seed: VVVGAGDVG (KRAS G13D)
LVVHANDVV

SEQ ID NO: 90169 - protein, 9 aa, synthetic construct
  source 1..9: note = Seed: VVVGAGDVG (KRAS G13D)
LVVHAPDVA

SEQ ID NO: 90170 - protein, 9 aa, synthetic construct
  source 1..9: note = Seed: VVVGAGDVG (KRAS G13D)
LVVHAPDVN

SEQ ID NO: 90171 - protein, 9 aa, synthetic construct
  source 1..9: note = Seed: VVVGAGDVG (KRAS G13D)
LVVHAPDVS

SEQ ID NO: 90172 - protein, 9 aa, synthetic construct
  source 1..9: note = Seed: VVVGAGDVG (KRAS G13D)
LVVHAPDVT

SEQ ID NO: 90173 - protein, 9 aa, synthetic construct
  source 1..9: note = Seed: VVVGAGDVG (KRAS G13D)
LVVHAPDVV

SEQ ID NO: 90174 - protein, 9 aa, synthetic construct
  source 1..9: note = Seed: VVVGAGDVG (KRAS G13D)
LVVHASDVA

SEQ ID NO: 90175 - protein, 9 aa, synthetic construct
  source 1..9: note = Seed: VVVGAGDVG (KRAS G13D)
LVVHASDVC

SEQ ID NO: 90176 - protein, 9 aa, synthetic construct
  source 1..9: note = Seed: VVVGAGDVG (KRAS G13D)
LVVHASDVF

SEQ ID NO: 90177 - protein, 9 aa, synthetic construct
  source 1..9: note = Seed: VVVGAGDVG (KRAS G13D)
LVVHASDVG

SEQ ID NO: 90178 - protein, 9 aa, synthetic construct
  source 1..9: note = Seed: VVVGAGDVG (KRAS G13D)
LVVHASDVI

SEQ ID NO: 90179 - protein, 9 aa, synthetic construct
  source 1..9: note = Seed: VVVGAGDVG (KRAS G13D)
LVVHASDVL

SEQ ID NO: 90180 - protein, 9 aa, synthetic construct
  source 1..9: note = Seed: VVVGAGDVG (KRAS G13D)
LVVHASDVM

SEQ ID NO: 90181 - protein, 9 aa, synthetic construct
  source 1..9: note = Seed: VVVGAGDVG (KRAS G13D)
LVVHASDVN

SEQ ID NO: 90182 - protein, 9 aa, synthetic construct
  source 1..9: note = Seed: VVVGAGDVG (KRAS G13D)
LVVHASDVS

SEQ ID NO: 90183 - protein, 9 aa, synthetic construct
  source 1..9: note = Seed: VVVGAGDVG (KRAS G13D)
LVVHASDVV

SEQ ID NO: 90184 - protein, 9 aa, synthetic construct
  source 1..9: note = Seed: VVVGAGDVG (KRAS G13D)
LVVHASDVY

SEQ ID NO: 90185 - protein, 9 aa, synthetic construct
  source 1..9: note = Seed: VVVGAGDVG (KRAS G13D)
LVVHATDVA

SEQ ID NO: 90186 - protein, 9 aa, synthetic construct
  source 1..9: note = Seed: VVVGAGDVG (KRAS G13D)
LVVHATDVD

SEQ ID NO: 90187 - protein, 9 aa, synthetic construct
  source 1..9: note = Seed: VVVGAGDVG (KRAS G13D)
LVVHATDVF

SEQ ID NO: 90188 - protein, 9 aa, synthetic construct
  source 1..9: note = Seed: VVVGAGDVG (KRAS G13D)
LVVHATDVG

SEQ ID NO: 90189 - protein, 9 aa, synthetic construct
  source 1..9: note = Seed: VVVGAGDVG (KRAS G13D)
LVVHATDVH

SEQ ID NO: 90190 - protein, 9 aa, synthetic construct
  source 1..9: note = Seed: VVVGAGDVG (KRAS G13D)
LVVHATDVI

SEQ ID NO: 90191 - protein, 9 aa, synthetic construct
  source 1..9: note = Seed: VVVGAGDVG (KRAS G13D)
LVVHATDVL

SEQ ID NO: 90192 - protein, 9 aa, synthetic construct
  source 1..9: note = Seed: VVVGAGDVG (KRAS G13D)
LVVHATDVM

SEQ ID NO: 90193 - protein, 9 aa, synthetic construct
  source 1..9: note = Seed: VVVGAGDVG (KRAS G13D)
LVVHATDVN

SEQ ID NO: 90194 - protein, 9 aa, synthetic construct
  source 1..9: note = Seed: VVVGAGDVG (KRAS G13D)
LVVHATDVQ

SEQ ID NO: 90195 - protein, 9 aa, synthetic construct
  source 1..9: note = Seed: VVVGAGDVG (KRAS G13D)
LVVHATDVS

SEQ ID NO: 90196 - protein, 9 aa, synthetic construct
  source 1..9: note = Seed: VVVGAGDVG (KRAS G13D)
LVVHATDVT

SEQ ID NO: 90197 - protein, 9 aa, synthetic construct
  source 1..9: note = Seed: VVVGAGDVG (KRAS G13D)
LVVHAVDVA

SEQ ID NO: 90198 - protein, 9 aa, synthetic construct
  source 1..9: note = Seed: VVVGAGDVG (KRAS G13D)
LVVHAVDVF

SEQ ID NO: 90199 - protein, 9 aa, synthetic construct
  source 1..9: note = Seed: VVVGAGDVG (KRAS G13D)
LVVHAVDVG

SEQ ID NO: 90200 - protein, 9 aa, synthetic construct
  source 1..9: note = Seed: VVVGAGDVG (KRAS G13D)
LVVHAVDVI

SEQ ID NO: 90201 - protein, 9 aa, synthetic construct
  source 1..9: note = Seed: VVVGAGDVG (KRAS G13D)
LVVHAVDVL

SEQ ID NO: 90202 - protein, 9 aa, synthetic construct
  source 1..9: note = Seed: VVVGAGDVG (KRAS G13D)
LVVHAVDVM

SEQ ID NO: 90203 - protein, 9 aa, synthetic construct
  source 1..9: note = Seed: VVVGAGDVG (KRAS G13D)
LVVHAVDVN

SEQ ID NO: 90204 - protein, 9 aa, synthetic construct
  source 1..9: note = Seed: VVVGAGDVG (KRAS G13D)
LVVHAVDVS

SEQ ID NO: 90205 - protein, 9 aa, synthetic construct
  source 1..9: note = Seed: VVVGAGDVG (KRAS G13D)
LVVHAVDVV

SEQ ID NO: 90206 - protein, 9 aa, synthetic construct
  source 1..9: note = Seed: VVVGAGDVG (KRAS G13D)
LVVIAADVA

SEQ ID NO: 90207 - protein, 9 aa, synthetic construct
  source 1..9: note = Seed: VVVGAGDVG (KRAS G13D)
LVVIAADVE

SEQ ID NO: 90208 - protein, 9 aa, synthetic construct
  source 1..9: note = Seed: VVVGAGDVG (KRAS G13D)
LVVIAADVG

SEQ ID NO: 90209 - protein, 9 aa, synthetic construct
  source 1..9: note = Seed: VVVGAGDVG (KRAS G13D)
LVVIAADVH

SEQ ID NO: 90210 - protein, 9 aa, synthetic construct
  source 1..9: note = Seed: VVVGAGDVG (KRAS G13D)
LVVIAADVI

SEQ ID NO: 90211 - protein, 9 aa, synthetic construct
  source 1..9: note = Seed: VVVGAGDVG (KRAS G13D)
LVVIAADVK

SEQ ID NO: 90212 - protein, 9 aa, synthetic construct
  source 1..9: note = Seed: VVVGAGDVG (KRAS G13D)
LVVIAADVL

SEQ ID NO: 90213 - protein, 9 aa, synthetic construct
  source 1..9: note = Seed: VVVGAGDVG (KRAS G13D)
LVVIAADVM

SEQ ID NO: 90214 - protein, 9 aa, synthetic construct
  source 1..9: note = Seed: VVVGAGDVG (KRAS G13D)
LVVIAADVN

SEQ ID NO: 90215 - protein, 9 aa, synthetic construct
  source 1..9: note = Seed: VVVGAGDVG (KRAS G13D)
LVVIAADVP

SEQ ID NO: 90216 - protein, 9 aa, synthetic construct
  source 1..9: note = Seed: VVVGAGDVG (KRAS G13D)
LVVIAADVQ

SEQ ID NO: 90217 - protein, 9 aa, synthetic construct
  source 1..9: note = Seed: VVVGAGDVG (KRAS G13D)
LVVIAADVS

SEQ ID NO: 90218 - protein, 9 aa, synthetic construct
  source 1..9: note = Seed: VVVGAGDVG (KRAS G13D)
LVVIAADVT

SEQ ID NO: 90219 - protein, 9 aa, synthetic construct
  source 1..9: note = Seed: VVVGAGDVG (KRAS G13D)
LVVIAADVV

SEQ ID NO: 90220 - protein, 9 aa, synthetic construct
  source 1..9: note = Seed: VVVGAGDVG (KRAS G13D)
LVVIAADVY

SEQ ID NO: 90221 - protein, 9 aa, synthetic construct
  source 1..9: note = Seed: VVVGAGDVG (KRAS G13D)
LVVIADDVA

SEQ ID NO: 90222 - protein, 9 aa, synthetic construct
  source 1..9: note = Seed: VVVGAGDVG (KRAS G13D)
LVVIADDVG

SEQ ID NO: 90223 - protein, 9 aa, synthetic construct
  source 1..9: note = Seed: VVVGAGDVG (KRAS G13D)
LVVIADDVI

SEQ ID NO: 90224 - protein, 9 aa, synthetic construct
  source 1..9: note = Seed: VVVGAGDVG (KRAS G13D)
LVVIADDVL

SEQ ID NO: 90225 - protein, 9 aa, synthetic construct
  source 1..9: note = Seed: VVVGAGDVG (KRAS G13D)
LVVIADDVS

SEQ ID NO: 90226 - protein, 9 aa, synthetic construct
  source 1..9: note = Seed: VVVGAGDVG (KRAS G13D)
LVVIADDVV

SEQ ID NO: 90227 - protein, 9 aa, synthetic construct
  source 1..9: note = Seed: VVVGAGDVG (KRAS G13D)
LVVIAGDVA

SEQ ID NO: 90228 - protein, 9 aa, synthetic construct
  source 1..9: note = Seed: VVVGAGDVG (KRAS G13D)
LVVIAGDVH

SEQ ID NO: 90229 - protein, 9 aa, synthetic construct
  source 1..9: note = Seed: VVVGAGDVG (KRAS G13D)
LVVIAGDVN

SEQ ID NO: 90230 - protein, 9 aa, synthetic construct
  source 1..9: note = Seed: VVVGAGDVG (KRAS G13D)
LVVIAGDVS

SEQ ID NO: 90231 - protein, 9 aa, synthetic construct
  source 1..9: note = Seed: VVVGAGDVG (KRAS G13D)
LVVIAHDVA

SEQ ID NO: 90232 - protein, 9 aa, synthetic construct
  source 1..9: note = Seed: VVVGAGDVG (KRAS G13D)
LVVIAHDVG

SEQ ID NO: 90233 - protein, 9 aa, synthetic construct
  source 1..9: note = Seed: VVVGAGDVG (KRAS G13D)
LVVIAHDVN

SEQ ID NO: 90234 - protein, 9 aa, synthetic construct
  source 1..9: note = Seed: VVVGAGDVG (KRAS G13D)
LVVIAHDVQ

SEQ ID NO: 90235 - protein, 9 aa, synthetic construct
  source 1..9: note = Seed: VVVGAGDVG (KRAS G13D)
LVVIAHDVS

SEQ ID NO: 90236 - protein, 9 aa, synthetic construct
  source 1..9: note = Seed: VVVGAGDVG (KRAS G13D)
LVVIAIDVN

SEQ ID NO: 90237 - protein, 9 aa, synthetic construct
  source 1..9: note = Seed: VVVGAGDVG (KRAS G13D)
LVVIAIDVQ

SEQ ID NO: 90238 - protein, 9 aa, synthetic construct
  source 1..9: note = Seed: VVVGAGDVG (KRAS G13D)
LVVIAIDVS

SEQ ID NO: 90239 - protein, 9 aa, synthetic construct
  source 1..9: note = Seed: VVVGAGDVG (KRAS G13D)
LVVIANDVA

SEQ ID NO: 90240 - protein, 9 aa, synthetic construct
  source 1..9: note = Seed: VVVGAGDVG (KRAS G13D)
LVVIANDVD

SEQ ID NO: 90241 - protein, 9 aa, synthetic construct
  source 1..9: note = Seed: VVVGAGDVG (KRAS G13D)
LVVIANDVE

SEQ ID NO: 90242 - protein, 9 aa, synthetic construct
  source 1..9: note = Seed: VVVGAGDVG (KRAS G13D)
LVVIANDVF

SEQ ID NO: 90243 - protein, 9 aa, synthetic construct
  source 1..9: note = Seed: VVVGAGDVG (KRAS G13D)
LVVIANDVG

SEQ ID NO: 90244 - protein, 9 aa, synthetic construct
  source 1..9: note = Seed: VVVGAGDVG (KRAS G13D)
LVVIANDVH

SEQ ID NO: 90245 - protein, 9 aa, synthetic construct
  source 1..9: note = Seed: VVVGAGDVG (KRAS G13D)
LVVIANDVI

SEQ ID NO: 90246 - protein, 9 aa, synthetic construct
  source 1..9: note = Seed: VVVGAGDVG (KRAS G13D)
LVVIANDVL

SEQ ID NO: 90247 - protein, 9 aa, synthetic construct
  source 1..9: note = Seed: VVVGAGDVG (KRAS G13D)
LVVIANDVM

SEQ ID NO: 90248 - protein, 9 aa, synthetic construct
  source 1..9: note = Seed: VVVGAGDVG (KRAS G13D)
LVVIANDVN

SEQ ID NO: 90249 - protein, 9 aa, synthetic construct
  source 1..9: note = Seed: VVVGAGDVG (KRAS G13D)
LVVIANDVP

SEQ ID NO: 90250 - protein, 9 aa, synthetic construct
  source 1..9: note = Seed: VVVGAGDVG (KRAS G13D)
LVVIANDVQ

SEQ ID NO: 90251 - protein, 9 aa, synthetic construct
  source 1..9: note = Seed: VVVGAGDVG (KRAS G13D)
LVVIANDVS

SEQ ID NO: 90252 - protein, 9 aa, synthetic construct
  source 1..9: note = Seed: VVVGAGDVG (KRAS G13D)
LVVIANDVT

SEQ ID NO: 90253 - protein, 9 aa, synthetic construct
  source 1..9: note = Seed: VVVGAGDVG (KRAS G13D)
LVVIANDVV

SEQ ID NO: 90254 - protein, 9 aa, synthetic construct
  source 1..9: note = Seed: VVVGAGDVG (KRAS G13D)
LVVIANDVY

SEQ ID NO: 90255 - protein, 9 aa, synthetic construct
  source 1..9: note = Seed: VVVGAGDVG (KRAS G13D)
LVVIAPDVA

SEQ ID NO: 90256 - protein, 9 aa, synthetic construct
  source 1..9: note = Seed: VVVGAGDVG (KRAS G13D)
LVVIAPDVF

SEQ ID NO: 90257 - protein, 9 aa, synthetic construct
  source 1..9: note = Seed: VVVGAGDVG (KRAS G13D)
LVVIAPDVG

SEQ ID NO: 90258 - protein, 9 aa, synthetic construct
  source 1..9: note = Seed: VVVGAGDVG (KRAS G13D)
LVVIAPDVH

SEQ ID NO: 90259 - protein, 9 aa, synthetic construct
  source 1..9: note = Seed: VVVGAGDVG (KRAS G13D)
LVVIAPDVI

SEQ ID NO: 90260 - protein, 9 aa, synthetic construct
  source 1..9: note = Seed: VVVGAGDVG (KRAS G13D)
LVVIAPDVK

SEQ ID NO: 90261 - protein, 9 aa, synthetic construct
  source 1..9: note = Seed: VVVGAGDVG (KRAS G13D)
LVVIAPDVL

SEQ ID NO: 90262 - protein, 9 aa, synthetic construct
  source 1..9: note = Seed: VVVGAGDVG (KRAS G13D)
LVVIAPDVM

SEQ ID NO: 90263 - protein, 9 aa, synthetic construct
  source 1..9: note = Seed: VVVGAGDVG (KRAS G13D)
LVVIAPDVN

SEQ ID NO: 90264 - protein, 9 aa, synthetic construct
  source 1..9: note = Seed: VVVGAGDVG (KRAS G13D)
LVVIAPDVP

SEQ ID NO: 90265 - protein, 9 aa, synthetic construct
  source 1..9: note = Seed: VVVGAGDVG (KRAS G13D)
LVVIAPDVQ

SEQ ID NO: 90266 - protein, 9 aa, synthetic construct
  source 1..9: note = Seed: VVVGAGDVG (KRAS G13D)
LVVIAPDVR

SEQ ID NO: 90267 - protein, 9 aa, synthetic construct
  source 1..9: note = Seed: VVVGAGDVG (KRAS G13D)
LVVIAPDVS

SEQ ID NO: 90268 - protein, 9 aa, synthetic construct
  source 1..9: note = Seed: VVVGAGDVG (KRAS G13D)
LVVIAPDVT

SEQ ID NO: 90269 - protein, 9 aa, synthetic construct
  source 1..9: note = Seed: VVVGAGDVG (KRAS G13D)
LVVIAPDVV

SEQ ID NO: 90270 - protein, 9 aa, synthetic construct
  source 1..9: note = Seed: VVVGAGDVG (KRAS G13D)
LVVIAPDVW

SEQ ID NO: 90271 - protein, 9 aa, synthetic construct
  source 1..9: note = Seed: VVVGAGDVG (KRAS G13D)
LVVIAPDVY

SEQ ID NO: 90272 - protein, 9 aa, synthetic construct
  source 1..9: note = Seed: VVVGAGDVG (KRAS G13D)
LVVIASDVA

SEQ ID NO: 90273 - protein, 9 aa, synthetic construct
  source 1..9: note = Seed: VVVGAGDVG (KRAS G13D)
LVVIASDVE

SEQ ID NO: 90274 - protein, 9 aa, synthetic construct
  source 1..9: note = Seed: VVVGAGDVG (KRAS G13D)
LVVIASDVF

SEQ ID NO: 90275 - protein, 9 aa, synthetic construct
  source 1..9: note = Seed: VVVGAGDVG (KRAS G13D)
LVVIASDVG

SEQ ID NO: 90276 - protein, 9 aa, synthetic construct
  source 1..9: note = Seed: VVVGAGDVG (KRAS G13D)
LVVIASDVH

SEQ ID NO: 90277 - protein, 9 aa, synthetic construct
  source 1..9: note = Seed: VVVGAGDVG (KRAS G13D)
LVVIASDVI

SEQ ID NO: 90278 - protein, 9 aa, synthetic construct
  source 1..9: note = Seed: VVVGAGDVG (KRAS G13D)
LVVIASDVL

SEQ ID NO: 90279 - protein, 9 aa, synthetic construct
  source 1..9: note = Seed: VVVGAGDVG (KRAS G13D)
LVVIASDVM

SEQ ID NO: 90280 - protein, 9 aa, synthetic construct
  source 1..9: note = Seed: VVVGAGDVG (KRAS G13D)
LVVIASDVN

SEQ ID NO: 90281 - protein, 9 aa, synthetic construct
  source 1..9: note = Seed: VVVGAGDVG (KRAS G13D)
LVVIASDVP

SEQ ID NO: 90282 - protein, 9 aa, synthetic construct
  source 1..9: note = Seed: VVVGAGDVG (KRAS G13D)
LVVIASDVQ

SEQ ID NO: 90283 - protein, 9 aa, synthetic construct
  source 1..9: note = Seed: VVVGAGDVG (KRAS G13D)
LVVIASDVR

SEQ ID NO: 90284 - protein, 9 aa, synthetic construct
  source 1..9: note = Seed: VVVGAGDVG (KRAS G13D)
LVVIASDVS

SEQ ID NO: 90285 - protein, 9 aa, synthetic construct
  source 1..9: note = Seed: VVVGAGDVG (KRAS G13D)
LVVIASDVT

SEQ ID NO: 90286 - protein, 9 aa, synthetic construct
  source 1..9: note = Seed: VVVGAGDVG (KRAS G13D)
LVVIASDVV

SEQ ID NO: 90287 - protein, 9 aa, synthetic construct
  source 1..9: note = Seed: VVVGAGDVG (KRAS G13D)
LVVIASDVY

SEQ ID NO: 90288 - protein, 9 aa, synthetic construct
  source 1..9: note = Seed: VVVGAGDVG (KRAS G13D)
LVVIATDVA

SEQ ID NO: 90289 - protein, 9 aa, synthetic construct
  source 1..9: note = Seed: VVVGAGDVG (KRAS G13D)
LVVIATDVG

SEQ ID NO: 90290 - protein, 9 aa, synthetic construct
  source 1..9: note = Seed: VVVGAGDVG (KRAS G13D)
LVVIATDVH

SEQ ID NO: 90291 - protein, 9 aa, synthetic construct
  source 1..9: note = Seed: VVVGAGDVG (KRAS G13D)
LVVIATDVK

SEQ ID NO: 90292 - protein, 9 aa, synthetic construct
  source 1..9: note = Seed: VVVGAGDVG (KRAS G13D)
LVVIATDVL

SEQ ID NO: 90293 - protein, 9 aa, synthetic construct
  source 1..9: note = Seed: VVVGAGDVG (KRAS G13D)
LVVIATDVM

SEQ ID NO: 90294 - protein, 9 aa, synthetic construct
  source 1..9: note = Seed: VVVGAGDVG (KRAS G13D)
LVVIATDVN

SEQ ID NO: 90295 - protein, 9 aa, synthetic construct
  source 1..9: note = Seed: VVVGAGDVG (KRAS G13D)
LVVIATDVP

SEQ ID NO: 90296 - protein, 9 aa, synthetic construct
  source 1..9: note = Seed: VVVGAGDVG (KRAS G13D)
LVVIATDVQ

SEQ ID NO: 90297 - protein, 9 aa, synthetic construct
  source 1..9: note = Seed: VVVGAGDVG (KRAS G13D)
LVVIATDVR

SEQ ID NO: 90298 - protein, 9 aa, synthetic construct
  source 1..9: note = Seed: VVVGAGDVG (KRAS G13D)
LVVIATDVS

SEQ ID NO: 90299 - protein, 9 aa, synthetic construct
  source 1..9: note = Seed: VVVGAGDVG (KRAS G13D)
LVVIATDVT

SEQ ID NO: 90300 - protein, 9 aa, synthetic construct
  source 1..9: note = Seed: VVVGAGDVG (KRAS G13D)
LVVIATDVV

SEQ ID NO: 90301 - protein, 9 aa, synthetic construct
  source 1..9: note = Seed: VVVGAGDVG (KRAS G13D)
LVVIAVDVA

SEQ ID NO: 90302 - protein, 9 aa, synthetic construct
  source 1..9: note = Seed: VVVGAGDVG (KRAS G13D)
LVVIAVDVH

SEQ ID NO: 90303 - protein, 9 aa, synthetic construct
  source 1..9: note = Seed: VVVGAGDVG (KRAS G13D)
LVVIAVDVN

SEQ ID NO: 90304 - protein, 9 aa, synthetic construct
  source 1..9: note = Seed: VVVGAGDVG (KRAS G13D)
LVVIAVDVQ

SEQ ID NO: 90305 - protein, 9 aa, synthetic construct
  source 1..9: note = Seed: VVVGAGDVG (KRAS G13D)
LVVIAVDVS

SEQ ID NO: 90306 - protein, 9 aa, synthetic construct
  source 1..9: note = Seed: VVVGAGDVG (KRAS G13D)
LVVKAADVC

SEQ ID NO: 90307 - protein, 9 aa, synthetic construct
  source 1..9: note = Seed: VVVGAGDVG (KRAS G13D)
LVVKAADVG

SEQ ID NO: 90308 - protein, 9 aa, synthetic construct
  source 1..9: note = Seed: VVVGAGDVG (KRAS G13D)
LVVKAADVL

SEQ ID NO: 90309 - protein, 9 aa, synthetic construct
  source 1..9: note = Seed: VVVGAGDVG (KRAS G13D)
LVVKAADVN

SEQ ID NO: 90310 - protein, 9 aa, synthetic construct
  source 1..9: note = Seed: VVVGAGDVG (KRAS G13D)
LVVKAADVS

SEQ ID NO: 90311 - protein, 9 aa, synthetic construct
  source 1..9: note = Seed: VVVGAGDVG (KRAS G13D)
LVVKAGDVA

SEQ ID NO: 90312 - protein, 9 aa, synthetic construct
  source 1..9: note = Seed: VVVGAGDVG (KRAS G13D)
LVVKANDVA

SEQ ID NO: 90313 - protein, 9 aa, synthetic construct
  source 1..9: note = Seed: VVVGAGDVG (KRAS G13D)
LVVKAPDVA

SEQ ID NO: 90314 - protein, 9 aa, synthetic construct
  source 1..9: note = Seed: VVVGAGDVG (KRAS G13D)
LVVKAPDVS

SEQ ID NO: 90315 - protein, 9 aa, synthetic construct
  source 1..9: note = Seed: VVVGAGDVG (KRAS G13D)
LVVKASDVC

SEQ ID NO: 90316 - protein, 9 aa, synthetic construct
  source 1..9: note = Seed: VVVGAGDVG (KRAS G13D)
LVVKASDVN

SEQ ID NO: 90317 - protein, 9 aa, synthetic construct
  source 1..9: note = Seed: VVVGAGDVG (KRAS G13D)
LVVKASDVS

SEQ ID NO: 90318 - protein, 9 aa, synthetic construct
  source 1..9: note = Seed: VVVGAGDVG (KRAS G13D)
LVVKATDVA

SEQ ID NO: 90319 - protein, 9 aa, synthetic construct
  source 1..9: note = Seed: VVVGAGDVG (KRAS G13D)
LVVKATDVG

SEQ ID NO: 90320 - protein, 9 aa, synthetic construct
  source 1..9: note = Seed: VVVGAGDVG (KRAS G13D)
LVVKATDVN

SEQ ID NO: 90321 - protein, 9 aa, synthetic construct
  source 1..9: note = Seed: VVVGAGDVG (KRAS G13D)
LVVKATDVS

SEQ ID NO: 90322 - protein, 9 aa, synthetic construct
  source 1..9: note = Seed: VVVGAGDVG (KRAS G13D)
LVVKAVDVG

SEQ ID NO: 90323 - protein, 9 aa, synthetic construct
  source 1..9: note = Seed: VVVGAGDVG (KRAS G13D)
LVVKAVDVS

SEQ ID NO: 90324 - protein, 9 aa, synthetic construct
  source 1..9: note = Seed: VVVGAGDVG (KRAS G13D)
LVVLAADVA

SEQ ID NO: 90325 - protein, 9 aa, synthetic construct
  source 1..9: note = Seed: VVVGAGDVG (KRAS G13D)
LVVLAADVD

SEQ ID NO: 90326 - protein, 9 aa, synthetic construct
  source 1..9: note = Seed: VVVGAGDVG (KRAS G13D)
LVVLAADVE

SEQ ID NO: 90327 - protein, 9 aa, synthetic construct
  source 1..9: note = Seed: VVVGAGDVG (KRAS G13D)
LVVLAADVF

SEQ ID NO: 90328 - protein, 9 aa, synthetic construct
  source 1..9: note = Seed: VVVGAGDVG (KRAS G13D)
LVVLAADVG

SEQ ID NO: 90329 - protein, 9 aa, synthetic construct
  source 1..9: note = Seed: VVVGAGDVG (KRAS G13D)
LVVLAADVH

SEQ ID NO: 90330 - protein, 9 aa, synthetic construct
  source 1..9: note = Seed: VVVGAGDVG (KRAS G13D)
LVVLAADVI

SEQ ID NO: 90331 - protein, 9 aa, synthetic construct
  source 1..9: note = Seed: VVVGAGDVG (KRAS G13D)
LVVLAADVK

SEQ ID NO: 90332 - protein, 9 aa, synthetic construct
  source 1..9: note = Seed: VVVGAGDVG (KRAS G13D)
LVVLAADVL

SEQ ID NO: 90333 - protein, 9 aa, synthetic construct
  source 1..9: note = Seed: VVVGAGDVG (KRAS G13D)
LVVLAADVM

SEQ ID NO: 90334 - protein, 9 aa, synthetic construct
  source 1..9: note = Seed: VVVGAGDVG (KRAS G13D)
LVVLAADVN

SEQ ID NO: 90335 - protein, 9 aa, synthetic construct
  source 1..9: note = Seed: VVVGAGDVG (KRAS G13D)
LVVLAADVP

SEQ ID NO: 90336 - protein, 9 aa, synthetic construct
  source 1..9: note = Seed: VVVGAGDVG (KRAS G13D)
LVVLAADVQ

SEQ ID NO: 90337 - protein, 9 aa, synthetic construct
  source 1..9: note = Seed: VVVGAGDVG (KRAS G13D)
LVVLAADVR

SEQ ID NO: 90338 - protein, 9 aa, synthetic construct
  source 1..9: note = Seed: VVVGAGDVG (KRAS G13D)
LVVLAADVS

SEQ ID NO: 90339 - protein, 9 aa, synthetic construct
  source 1..9: note = Seed: VVVGAGDVG (KRAS G13D)
LVVLAADVT

SEQ ID NO: 90340 - protein, 9 aa, synthetic construct
  source 1..9: note = Seed: VVVGAGDVG (KRAS G13D)
LVVLAADVV

SEQ ID NO: 90341 - protein, 9 aa, synthetic construct
  source 1..9: note = Seed: VVVGAGDVG (KRAS G13D)
LVVLAADVY

SEQ ID NO: 90342 - protein, 9 aa, synthetic construct
  source 1..9: note = Seed: VVVGAGDVG (KRAS G13D)
LVVLADDVA

SEQ ID NO: 90343 - protein, 9 aa, synthetic construct
  source 1..9: note = Seed: VVVGAGDVG (KRAS G13D)
LVVLADDVF

SEQ ID NO: 90344 - protein, 9 aa, synthetic construct
  source 1..9: note = Seed: VVVGAGDVG (KRAS G13D)
LVVLADDVG

SEQ ID NO: 90345 - protein, 9 aa, synthetic construct
  source 1..9: note = Seed: VVVGAGDVG (KRAS G13D)
LVVLADDVI

SEQ ID NO: 90346 - protein, 9 aa, synthetic construct
  source 1..9: note = Seed: VVVGAGDVG (KRAS G13D)
LVVLADDVL

SEQ ID NO: 90347 - protein, 9 aa, synthetic construct
  source 1..9: note = Seed: VVVGAGDVG (KRAS G13D)
LVVLADDVM

SEQ ID NO: 90348 - protein, 9 aa, synthetic construct
  source 1..9: note = Seed: VVVGAGDVG (KRAS G13D)
LVVLADDVS

SEQ ID NO: 90349 - protein, 9 aa, synthetic construct
  source 1..9: note = Seed: VVVGAGDVG (KRAS G13D)
LVVLADDVV

SEQ ID NO: 90350 - protein, 9 aa, synthetic construct
  source 1..9: note = Seed: VVVGAGDVG (KRAS G13D)
LVVLAEDVA

SEQ ID NO: 90351 - protein, 9 aa, synthetic construct
  source 1..9: note = Seed: VVVGAGDVG (KRAS G13D)
LVVLAEDVN

SEQ ID NO: 90352 - protein, 9 aa, synthetic construct
  source 1..9: note = Seed: VVVGAGDVG (KRAS G13D)
LVVLAEDVS

SEQ ID NO: 90353 - protein, 9 aa, synthetic construct
  source 1..9: note = Seed: VVVGAGDVG (KRAS G13D)
LVVLAGDVA

SEQ ID NO: 90354 - protein, 9 aa, synthetic construct
  source 1..9: note = Seed: VVVGAGDVG (KRAS G13D)
LVVLAGDVG

SEQ ID NO: 90355 - protein, 9 aa, synthetic construct
  source 1..9: note = Seed: VVVGAGDVG (KRAS G13D)
LVVLAGDVH

SEQ ID NO: 90356 - protein, 9 aa, synthetic construct
  source 1..9: note = Seed: VVVGAGDVG (KRAS G13D)
LVVLAGDVI

SEQ ID NO: 90357 - protein, 9 aa, synthetic construct
  source 1..9: note = Seed: VVVGAGDVG (KRAS G13D)
LVVLAGDVL

SEQ ID NO: 90358 - protein, 9 aa, synthetic construct
  source 1..9: note = Seed: VVVGAGDVG (KRAS G13D)
LVVLAGDVM

SEQ ID NO: 90359 - protein, 9 aa, synthetic construct
  source 1..9: note = Seed: VVVGAGDVG (KRAS G13D)
LVVLAGDVN

SEQ ID NO: 90360 - protein, 9 aa, synthetic construct
  source 1..9: note = Seed: VVVGAGDVG (KRAS G13D)
LVVLAGDVP

SEQ ID NO: 90361 - protein, 9 aa, synthetic construct
  source 1..9: note = Seed: VVVGAGDVG (KRAS G13D)
LVVLAGDVQ

SEQ ID NO: 90362 - protein, 9 aa, synthetic construct
  source 1..9: note = Seed: VVVGAGDVG (KRAS G13D)
LVVLAGDVS

SEQ ID NO: 90363 - protein, 9 aa, synthetic construct
  source 1..9: note = Seed: VVVGAGDVG (KRAS G13D)
LVVLAGDVT

SEQ ID NO: 90364 - protein, 9 aa, synthetic construct
  source 1..9: note = Seed: VVVGAGDVG (KRAS G13D)
LVVLAGDVV

SEQ ID NO: 90365 - protein, 9 aa, synthetic construct
  source 1..9: note = Seed: VVVGAGDVG (KRAS G13D)
LVVLAHDVA

SEQ ID NO: 90366 - protein, 9 aa, synthetic construct
  source 1..9: note = Seed: VVVGAGDVG (KRAS G13D)
LVVLAHDVD

SEQ ID NO: 90367 - protein, 9 aa, synthetic construct
  source 1..9: note = Seed: VVVGAGDVG (KRAS G13D)
LVVLAHDVG

SEQ ID NO: 90368 - protein, 9 aa, synthetic construct
  source 1..9: note = Seed: VVVGAGDVG (KRAS G13D)
LVVLAHDVL

SEQ ID NO: 90369 - protein, 9 aa, synthetic construct
  source 1..9: note = Seed: VVVGAGDVG (KRAS G13D)
LVVLAHDVM

SEQ ID NO: 90370 - protein, 9 aa, synthetic construct
  source 1..9: note = Seed: VVVGAGDVG (KRAS G13D)
LVVLAHDVN

SEQ ID NO: 90371 - protein, 9 aa, synthetic construct
  source 1..9: note = Seed: VVVGAGDVG (KRAS G13D)
LVVLAHDVQ

SEQ ID NO: 90372 - protein, 9 aa, synthetic construct
  source 1..9: note = Seed: VVVGAGDVG (KRAS G13D)
LVVLAHDVS

SEQ ID NO: 90373 - protein, 9 aa, synthetic construct
  source 1..9: note = Seed: VVVGAGDVG (KRAS G13D)
LVVLAHDVT

SEQ ID NO: 90374 - protein, 9 aa, synthetic construct
  source 1..9: note = Seed: VVVGAGDVG (KRAS G13D)
LVVLAHDVV

SEQ ID NO: 90375 - protein, 9 aa, synthetic construct
  source 1..9: note = Seed: VVVGAGDVG (KRAS G13D)
LVVLAIDVA

SEQ ID NO: 90376 - protein, 9 aa, synthetic construct
  source 1..9: note = Seed: VVVGAGDVG (KRAS G13D)
LVVLAIDVE

SEQ ID NO: 90377 - protein, 9 aa, synthetic construct
  source 1..9: note = Seed: VVVGAGDVG (KRAS G13D)
LVVLAIDVG

SEQ ID NO: 90378 - protein, 9 aa, synthetic construct
  source 1..9: note = Seed: VVVGAGDVG (KRAS G13D)
LVVLAIDVH

SEQ ID NO: 90379 - protein, 9 aa, synthetic construct
  source 1..9: note = Seed: VVVGAGDVG (KRAS G13D)
LVVLAIDVK

SEQ ID NO: 90380 - protein, 9 aa, synthetic construct
  source 1..9: note = Seed: VVVGAGDVG (KRAS G13D)
LVVLAIDVM

SEQ ID NO: 90381 - protein, 9 aa, synthetic construct
  source 1..9: note = Seed: VVVGAGDVG (KRAS G13D)
LVVLAIDVN

SEQ ID NO: 90382 - protein, 9 aa, synthetic construct
  source 1..9: note = Seed: VVVGAGDVG (KRAS G13D)
LVVLAIDVQ

SEQ ID NO: 90383 - protein, 9 aa, synthetic construct
  source 1..9: note = Seed: VVVGAGDVG (KRAS G13D)
LVVLAIDVS

SEQ ID NO: 90384 - protein, 9 aa, synthetic construct
  source 1..9: note = Seed: VVVGAGDVG (KRAS G13D)
LVVLAIDVT

SEQ ID NO: 90385 - protein, 9 aa, synthetic construct
  source 1..9: note = Seed: VVVGAGDVG (KRAS G13D)
LVVLAKDVA

SEQ ID NO: 90386 - protein, 9 aa, synthetic construct
  source 1..9: note = Seed: VVVGAGDVG (KRAS G13D)
LVVLANDVA

SEQ ID NO: 90387 - protein, 9 aa, synthetic construct
  source 1..9: note = Seed: VVVGAGDVG (KRAS G13D)
LVVLANDVD

SEQ ID NO: 90388 - protein, 9 aa, synthetic construct
  source 1..9: note = Seed: VVVGAGDVG (KRAS G13D)
LVVLANDVE

SEQ ID NO: 90389 - protein, 9 aa, synthetic construct
  source 1..9: note = Seed: VVVGAGDVG (KRAS G13D)
LVVLANDVF

SEQ ID NO: 90390 - protein, 9 aa, synthetic construct
  source 1..9: note = Seed: VVVGAGDVG (KRAS G13D)
LVVLANDVG

SEQ ID NO: 90391 - protein, 9 aa, synthetic construct
  source 1..9: note = Seed: VVVGAGDVG (KRAS G13D)
LVVLANDVH

SEQ ID NO: 90392 - protein, 9 aa, synthetic construct
  source 1..9: note = Seed: VVVGAGDVG (KRAS G13D)
LVVLANDVI

SEQ ID NO: 90393 - protein, 9 aa, synthetic construct
  source 1..9: note = Seed: VVVGAGDVG (KRAS G13D)
LVVLANDVK

SEQ ID NO: 90394 - protein, 9 aa, synthetic construct
  source 1..9: note = Seed: VVVGAGDVG (KRAS G13D)
LVVLANDVL

SEQ ID NO: 90395 - protein, 9 aa, synthetic construct
  source 1..9: note = Seed: VVVGAGDVG (KRAS G13D)
LVVLANDVM

SEQ ID NO: 90396 - protein, 9 aa, synthetic construct
  source 1..9: note = Seed: VVVGAGDVG (KRAS G13D)
LVVLANDVN

SEQ ID NO: 90397 - protein, 9 aa, synthetic construct
  source 1..9: note = Seed: VVVGAGDVG (KRAS G13D)
LVVLANDVP

SEQ ID NO: 90398 - protein, 9 aa, synthetic construct
  source 1..9: note = Seed: VVVGAGDVG (KRAS G13D)
LVVLANDVQ

SEQ ID NO: 90399 - protein, 9 aa, synthetic construct
  source 1..9: note = Seed: VVVGAGDVG (KRAS G13D)
LVVLANDVR

SEQ ID NO: 90400 - protein, 9 aa, synthetic construct
  source 1..9: note = Seed: VVVGAGDVG (KRAS G13D)
LVVLANDVS

SEQ ID NO: 90401 - protein, 9 aa, synthetic construct
  source 1..9: note = Seed: VVVGAGDVG (KRAS G13D)
LVVLANDVT

SEQ ID NO: 90402 - protein, 9 aa, synthetic construct
  source 1..9: note = Seed: VVVGAGDVG (KRAS G13D)
LVVLANDVV

SEQ ID NO: 90403 - protein, 9 aa, synthetic construct
  source 1..9: note = Seed: VVVGAGDVG (KRAS G13D)
LVVLANDVY

SEQ ID NO: 90404 - protein, 9 aa, synthetic construct
  source 1..9: note = Seed: VVVGAGDVG (KRAS G13D)
LVVLAPDVA

SEQ ID NO: 90405 - protein, 9 aa, synthetic construct
  source 1..9: note = Seed: VVVGAGDVG (KRAS G13D)
LVVLAPDVC

SEQ ID NO: 90406 - protein, 9 aa, synthetic construct
  source 1..9: note = Seed: VVVGAGDVG (KRAS G13D)
LVVLAPDVD

SEQ ID NO: 90407 - protein, 9 aa, synthetic construct
  source 1..9: note = Seed: VVVGAGDVG (KRAS G13D)
LVVLAPDVE

SEQ ID NO: 90408 - protein, 9 aa, synthetic construct
  source 1..9: note = Seed: VVVGAGDVG (KRAS G13D)
LVVLAPDVF

SEQ ID NO: 90409 - protein, 9 aa, synthetic construct
  source 1..9: note = Seed: VVVGAGDVG (KRAS G13D)
LVVLAPDVG

SEQ ID NO: 90410 - protein, 9 aa, synthetic construct
  source 1..9: note = Seed: VVVGAGDVG (KRAS G13D)
LVVLAPDVH

SEQ ID NO: 90411 - protein, 9 aa, synthetic construct
  source 1..9: note = Seed: VVVGAGDVG (KRAS G13D)
LVVLAPDVI

SEQ ID NO: 90412 - protein, 9 aa, synthetic construct
  source 1..9: note = Seed: VVVGAGDVG (KRAS G13D)
LVVLAPDVK

SEQ ID NO: 90413 - protein, 9 aa, synthetic construct
  source 1..9: note = Seed: VVVGAGDVG (KRAS G13D)
LVVLAPDVL

SEQ ID NO: 90414 - protein, 9 aa, synthetic construct
  source 1..9: note = Seed: VVVGAGDVG (KRAS G13D)
LVVLAPDVM

SEQ ID NO: 90415 - protein, 9 aa, synthetic construct
  source 1..9: note = Seed: VVVGAGDVG (KRAS G13D)
LVVLAPDVN

SEQ ID NO: 90416 - protein, 9 aa, synthetic construct
  source 1..9: note = Seed: VVVGAGDVG (KRAS G13D)
LVVLAPDVP

SEQ ID NO: 90417 - protein, 9 aa, synthetic construct
  source 1..9: note = Seed: VVVGAGDVG (KRAS G13D)
LVVLAPDVQ

SEQ ID NO: 90418 - protein, 9 aa, synthetic construct
  source 1..9: note = Seed: VVVGAGDVG (KRAS G13D)
LVVLAPDVR

SEQ ID NO: 90419 - protein, 9 aa, synthetic construct
  source 1..9: note = Seed: VVVGAGDVG (KRAS G13D)
LVVLAPDVS

SEQ ID NO: 90420 - protein, 9 aa, synthetic construct
  source 1..9: note = Seed: VVVGAGDVG (KRAS G13D)
LVVLAPDVT

SEQ ID NO: 90421 - protein, 9 aa, synthetic construct
  source 1..9: note = Seed: VVVGAGDVG (KRAS G13D)
LVVLAPDVV

SEQ ID NO: 90422 - protein, 9 aa, synthetic construct
  source 1..9: note = Seed: VVVGAGDVG (KRAS G13D)
LVVLAPDVW

SEQ ID NO: 90423 - protein, 9 aa, synthetic construct
  source 1..9: note = Seed: VVVGAGDVG (KRAS G13D)
LVVLAPDVY

SEQ ID NO: 90424 - protein, 9 aa, synthetic construct
  source 1..9: note = Seed: VVVGAGDVG (KRAS G13D)
LVVLAQDVS

SEQ ID NO: 90425 - protein, 9 aa, synthetic construct
  source 1..9: note = Seed: VVVGAGDVG (KRAS G13D)
LVVLARDVA

SEQ ID NO: 90426 - protein, 9 aa, synthetic construct
  source 1..9: note = Seed: VVVGAGDVG (KRAS G13D)
LVVLASDVA

SEQ ID NO: 90427 - protein, 9 aa, synthetic construct
  source 1..9: note = Seed: VVVGAGDVG (KRAS G13D)
LVVLASDVD

SEQ ID NO: 90428 - protein, 9 aa, synthetic construct
  source 1..9: note = Seed: VVVGAGDVG (KRAS G13D)
LVVLASDVE

SEQ ID NO: 90429 - protein, 9 aa, synthetic construct
  source 1..9: note = Seed: VVVGAGDVG (KRAS G13D)
LVVLASDVF

SEQ ID NO: 90430 - protein, 9 aa, synthetic construct
  source 1..9: note = Seed: VVVGAGDVG (KRAS G13D)
LVVLASDVG

SEQ ID NO: 90431 - protein, 9 aa, synthetic construct
  source 1..9: note = Seed: VVVGAGDVG (KRAS G13D)
LVVLASDVH

SEQ ID NO: 90432 - protein, 9 aa, synthetic construct
  source 1..9: note = Seed: VVVGAGDVG (KRAS G13D)
LVVLASDVI

SEQ ID NO: 90433 - protein, 9 aa, synthetic construct
  source 1..9: note = Seed: VVVGAGDVG (KRAS G13D)
LVVLASDVK

SEQ ID NO: 90434 - protein, 9 aa, synthetic construct
  source 1..9: note = Seed: VVVGAGDVG (KRAS G13D)
LVVLASDVL

SEQ ID NO: 90435 - protein, 9 aa, synthetic construct
  source 1..9: note = Seed: VVVGAGDVG (KRAS G13D)
LVVLASDVM

SEQ ID NO: 90436 - protein, 9 aa, synthetic construct
  source 1..9: note = Seed: VVVGAGDVG (KRAS G13D)
LVVLASDVN

SEQ ID NO: 90437 - protein, 9 aa, synthetic construct
  source 1..9: note = Seed: VVVGAGDVG (KRAS G13D)
LVVLASDVP

SEQ ID NO: 90438 - protein, 9 aa, synthetic construct
  source 1..9: note = Seed: VVVGAGDVG (KRAS G13D)
LVVLASDVQ

SEQ ID NO: 90439 - protein, 9 aa, synthetic construct
  source 1..9: note = Seed: VVVGAGDVG (KRAS G13D)
LVVLASDVR

SEQ ID NO: 90440 - protein, 9 aa, synthetic construct
  source 1..9: note = Seed: VVVGAGDVG (KRAS G13D)
LVVLASDVS

SEQ ID NO: 90441 - protein, 9 aa, synthetic construct
  source 1..9: note = Seed: VVVGAGDVG (KRAS G13D)
LVVLASDVT

SEQ ID NO: 90442 - protein, 9 aa, synthetic construct
  source 1..9: note = Seed: VVVGAGDVG (KRAS G13D)
LVVLASDVV

SEQ ID NO: 90443 - protein, 9 aa, synthetic construct
  source 1..9: note = Seed: VVVGAGDVG (KRAS G13D)
LVVLASDVY

SEQ ID NO: 90444 - protein, 9 aa, synthetic construct
  source 1..9: note = Seed: VVVGAGDVG (KRAS G13D)
LVVLATDVA

SEQ ID NO: 90445 - protein, 9 aa, synthetic construct
  source 1..9: note = Seed: VVVGAGDVG (KRAS G13D)
LVVLATDVE

SEQ ID NO: 90446 - protein, 9 aa, synthetic construct
  source 1..9: note = Seed: VVVGAGDVG (KRAS G13D)
LVVLATDVG

SEQ ID NO: 90447 - protein, 9 aa, synthetic construct
  source 1..9: note = Seed: VVVGAGDVG (KRAS G13D)
LVVLATDVH

SEQ ID NO: 90448 - protein, 9 aa, synthetic construct
  source 1..9: note = Seed: VVVGAGDVG (KRAS G13D)
LVVLATDVI

SEQ ID NO: 90449 - protein, 9 aa, synthetic construct
  source 1..9: note = Seed: VVVGAGDVG (KRAS G13D)
LVVLATDVK

SEQ ID NO: 90450 - protein, 9 aa, synthetic construct
  source 1..9: note = Seed: VVVGAGDVG (KRAS G13D)
LVVLATDVL

SEQ ID NO: 90451 - protein, 9 aa, synthetic construct
  source 1..9: note = Seed: VVVGAGDVG (KRAS G13D)
LVVLATDVM

SEQ ID NO: 90452 - protein, 9 aa, synthetic construct
  source 1..9: note = Seed: VVVGAGDVG (KRAS G13D)
LVVLATDVN

SEQ ID NO: 90453 - protein, 9 aa, synthetic construct
  source 1..9: note = Seed: VVVGAGDVG (KRAS G13D)
LVVLATDVP

SEQ ID NO: 90454 - protein, 9 aa, synthetic construct
  source 1..9: note = Seed: VVVGAGDVG (KRAS G13D)
LVVLATDVQ

SEQ ID NO: 90455 - protein, 9 aa, synthetic construct
  source 1..9: note = Seed: VVVGAGDVG (KRAS G13D)
LVVLATDVR

SEQ ID NO: 90456 - protein, 9 aa, synthetic construct
  source 1..9: note = Seed: VVVGAGDVG (KRAS G13D)
LVVLATDVS

SEQ ID NO: 90457 - protein, 9 aa, synthetic construct
  source 1..9: note = Seed: VVVGAGDVG (KRAS G13D)
LVVLATDVT

SEQ ID NO: 90458 - protein, 9 aa, synthetic construct
  source 1..9: note = Seed: VVVGAGDVG (KRAS G13D)
LVVLATDVV

SEQ ID NO: 90459 - protein, 9 aa, synthetic construct
  source 1..9: note = Seed: VVVGAGDVG (KRAS G13D)
LVVLAVDVA

SEQ ID NO: 90460 - protein, 9 aa, synthetic construct
  source 1..9: note = Seed: VVVGAGDVG (KRAS G13D)
LVVLAVDVH

SEQ ID NO: 90461 - protein, 9 aa, synthetic construct
  source 1..9: note = Seed: VVVGAGDVG (KRAS G13D)
LVVLAVDVK

SEQ ID NO: 90462 - protein, 9 aa, synthetic construct
  source 1..9: note = Seed: VVVGAGDVG (KRAS G13D)
LVVLAVDVN

SEQ ID NO: 90463 - protein, 9 aa, synthetic construct
  source 1..9: note = Seed: VVVGAGDVG (KRAS G13D)
LVVLAVDVP

SEQ ID NO: 90464 - protein, 9 aa, synthetic construct
  source 1..9: note = Seed: VVVGAGDVG (KRAS G13D)
LVVLAVDVQ

SEQ ID NO: 90465 - protein, 9 aa, synthetic construct
  source 1..9: note = Seed: VVVGAGDVG (KRAS G13D)
LVVLAVDVR

SEQ ID NO: 90466 - protein, 9 aa, synthetic construct
  source 1..9: note = Seed: VVVGAGDVG (KRAS G13D)
LVVLAVDVS

SEQ ID NO: 90467 - protein, 9 aa, synthetic construct
  source 1..9: note = Seed: VVVGAGDVG (KRAS G13D)
LVVLAVDVT

SEQ ID NO: 90468 - protein, 9 aa, synthetic construct
  source 1..9: note = Seed: VVVGAGDVG (KRAS G13D)
LVVMAADVA

SEQ ID NO: 90469 - protein, 9 aa, synthetic construct
  source 1..9: note = Seed: VVVGAGDVG (KRAS G13D)
LVVMAADVD

SEQ ID NO: 90470 - protein, 9 aa, synthetic construct
  source 1..9: note = Seed: VVVGAGDVG (KRAS G13D)
LVVMAADVE

SEQ ID NO: 90471 - protein, 9 aa, synthetic construct
  source 1..9: note = Seed: VVVGAGDVG (KRAS G13D)
LVVMAADVF

SEQ ID NO: 90472 - protein, 9 aa, synthetic construct
  source 1..9: note = Seed: VVVGAGDVG (KRAS G13D)
LVVMAADVG

SEQ ID NO: 90473 - protein, 9 aa, synthetic construct
  source 1..9: note = Seed: VVVGAGDVG (KRAS G13D)
LVVMAADVH

SEQ ID NO: 90474 - protein, 9 aa, synthetic construct
  source 1..9: note = Seed: VVVGAGDVG (KRAS G13D)
LVVMAADVI

SEQ ID NO: 90475 - protein, 9 aa, synthetic construct
  source 1..9: note = Seed: VVVGAGDVG (KRAS G13D)
LVVMAADVK

SEQ ID NO: 90476 - protein, 9 aa, synthetic construct
  source 1..9: note = Seed: VVVGAGDVG (KRAS G13D)
LVVMAADVL

SEQ ID NO: 90477 - protein, 9 aa, synthetic construct
  source 1..9: note = Seed: VVVGAGDVG (KRAS G13D)
LVVMAADVM

SEQ ID NO: 90478 - protein, 9 aa, synthetic construct
  source 1..9: note = Seed: VVVGAGDVG (KRAS G13D)
LVVMAADVN

SEQ ID NO: 90479 - protein, 9 aa, synthetic construct
  source 1..9: note = Seed: VVVGAGDVG (KRAS G13D)
LVVMAADVP

SEQ ID NO: 90480 - protein, 9 aa, synthetic construct
  source 1..9: note = Seed: VVVGAGDVG (KRAS G13D)
LVVMAADVQ

SEQ ID NO: 90481 - protein, 9 aa, synthetic construct
  source 1..9: note = Seed: VVVGAGDVG (KRAS G13D)
LVVMAADVR

SEQ ID NO: 90482 - protein, 9 aa, synthetic construct
  source 1..9: note = Seed: VVVGAGDVG (KRAS G13D)
LVVMAADVS

SEQ ID NO: 90483 - protein, 9 aa, synthetic construct
  source 1..9: note = Seed: VVVGAGDVG (KRAS G13D)
LVVMAADVT

SEQ ID NO: 90484 - protein, 9 aa, synthetic construct
  source 1..9: note = Seed: VVVGAGDVG (KRAS G13D)
LVVMAADVV

SEQ ID NO: 90485 - protein, 9 aa, synthetic construct
  source 1..9: note = Seed: VVVGAGDVG (KRAS G13D)
LVVMAADVY

SEQ ID NO: 90486 - protein, 9 aa, synthetic construct
  source 1..9: note = Seed: VVVGAGDVG (KRAS G13D)
LVVMADDVA

SEQ ID NO: 90487 - protein, 9 aa, synthetic construct
  source 1..9: note = Seed: VVVGAGDVG (KRAS G13D)
LVVMADDVF

SEQ ID NO: 90488 - protein, 9 aa, synthetic construct
  source 1..9: note = Seed: VVVGAGDVG (KRAS G13D)
LVVMADDVG

SEQ ID NO: 90489 - protein, 9 aa, synthetic construct
  source 1..9: note = Seed: VVVGAGDVG (KRAS G13D)
LVVMADDVI

SEQ ID NO: 90490 - protein, 9 aa, synthetic construct
  source 1..9: note = Seed: VVVGAGDVG (KRAS G13D)
LVVMADDVL

SEQ ID NO: 90491 - protein, 9 aa, synthetic construct
  source 1..9: note = Seed: VVVGAGDVG (KRAS G13D)
LVVMADDVM

SEQ ID NO: 90492 - protein, 9 aa, synthetic construct
  source 1..9: note = Seed: VVVGAGDVG (KRAS G13D)
LVVMADDVN

SEQ ID NO: 90493 - protein, 9 aa, synthetic construct
  source 1..9: note = Seed: VVVGAGDVG (KRAS G13D)
LVVMADDVQ

SEQ ID NO: 90494 - protein, 9 aa, synthetic construct
  source 1..9: note = Seed: VVVGAGDVG (KRAS G13D)
LVVMADDVS

SEQ ID NO: 90495 - protein, 9 aa, synthetic construct
  source 1..9: note = Seed: VVVGAGDVG (KRAS G13D)
LVVMADDVT

SEQ ID NO: 90496 - protein, 9 aa, synthetic construct
  source 1..9: note = Seed: VVVGAGDVG (KRAS G13D)
LVVMADDVV

SEQ ID NO: 90497 - protein, 9 aa, synthetic construct
  source 1..9: note = Seed: VVVGAGDVG (KRAS G13D)
LVVMADDVY

SEQ ID NO: 90498 - protein, 9 aa, synthetic construct
  source 1..9: note = Seed: VVVGAGDVG (KRAS G13D)
LVVMAEDVA

SEQ ID NO: 90499 - protein, 9 aa, synthetic construct
  source 1..9: note = Seed: VVVGAGDVG (KRAS G13D)
LVVMAEDVH

SEQ ID NO: 90500 - protein, 9 aa, synthetic construct
  source 1..9: note = Seed: VVVGAGDVG (KRAS G13D)
LVVMAEDVI

SEQ ID NO: 90501 - protein, 9 aa, synthetic construct
  source 1..9: note = Seed: VVVGAGDVG (KRAS G13D)
LVVMAEDVL

SEQ ID NO: 90502 - protein, 9 aa, synthetic construct
  source 1..9: note = Seed: VVVGAGDVG (KRAS G13D)
LVVMAEDVM

SEQ ID NO: 90503 - protein, 9 aa, synthetic construct
  source 1..9: note = Seed: VVVGAGDVG (KRAS G13D)
LVVMAEDVN

SEQ ID NO: 90504 - protein, 9 aa, synthetic construct
  source 1..9: note = Seed: VVVGAGDVG (KRAS G13D)
LVVMAEDVQ

SEQ ID NO: 90505 - protein, 9 aa, synthetic construct
  source 1..9: note = Seed: VVVGAGDVG (KRAS G13D)
LVVMAEDVS

SEQ ID NO: 90506 - protein, 9 aa, synthetic construct
  source 1..9: note = Seed: VVVGAGDVG (KRAS G13D)
LVVMAEDVT

SEQ ID NO: 90507 - protein, 9 aa, synthetic construct
  source 1..9: note = Seed: VVVGAGDVG (KRAS G13D)
LVVMAEDVV

SEQ ID NO: 90508 - protein, 9 aa, synthetic construct
  source 1..9: note = Seed: VVVGAGDVG (KRAS G13D)
LVVMAGDVA

SEQ ID NO: 90509 - protein, 9 aa, synthetic construct
  source 1..9: note = Seed: VVVGAGDVG (KRAS G13D)
LVVMAGDVG

SEQ ID NO: 90510 - protein, 9 aa, synthetic construct
  source 1..9: note = Seed: VVVGAGDVG (KRAS G13D)
LVVMAGDVH

SEQ ID NO: 90511 - protein, 9 aa, synthetic construct
  source 1..9: note = Seed: VVVGAGDVG (KRAS G13D)
LVVMAGDVI

SEQ ID NO: 90512 - protein, 9 aa, synthetic construct
  source 1..9: note = Seed: VVVGAGDVG (KRAS G13D)
LVVMAGDVK

SEQ ID NO: 90513 - protein, 9 aa, synthetic construct
  source 1..9: note = Seed: VVVGAGDVG (KRAS G13D)
LVVMAGDVL

SEQ ID NO: 90514 - protein, 9 aa, synthetic construct
  source 1..9: note = Seed: VVVGAGDVG (KRAS G13D)
LVVMAGDVM

SEQ ID NO: 90515 - protein, 9 aa, synthetic construct
  source 1..9: note = Seed: VVVGAGDVG (KRAS G13D)
LVVMAGDVN

SEQ ID NO: 90516 - protein, 9 aa, synthetic construct
  source 1..9: note = Seed: VVVGAGDVG (KRAS G13D)
LVVMAGDVP

SEQ ID NO: 90517 - protein, 9 aa, synthetic construct
  source 1..9: note = Seed: VVVGAGDVG (KRAS G13D)
LVVMAGDVQ

SEQ ID NO: 90518 - protein, 9 aa, synthetic construct
  source 1..9: note = Seed: VVVGAGDVG (KRAS G13D)
LVVMAGDVR

SEQ ID NO: 90519 - protein, 9 aa, synthetic construct
  source 1..9: note = Seed: VVVGAGDVG (KRAS G13D)
LVVMAGDVS

SEQ ID NO: 90520 - protein, 9 aa, synthetic construct
  source 1..9: note = Seed: VVVGAGDVG (KRAS G13D)
LVVMAGDVT

SEQ ID NO: 90521 - protein, 9 aa, synthetic construct
  source 1..9: note = Seed: VVVGAGDVG (KRAS G13D)
LVVMAGDVV

SEQ ID NO: 90522 - protein, 9 aa, synthetic construct
  source 1..9: note = Seed: VVVGAGDVG (KRAS G13D)
LVVMAHDVA

SEQ ID NO: 90523 - protein, 9 aa, synthetic construct
  source 1..9: note = Seed: VVVGAGDVG (KRAS G13D)
LVVMAHDVD

SEQ ID NO: 90524 - protein, 9 aa, synthetic construct
  source 1..9: note = Seed: VVVGAGDVG (KRAS G13D)
LVVMAHDVE

SEQ ID NO: 90525 - protein, 9 aa, synthetic construct
  source 1..9: note = Seed: VVVGAGDVG (KRAS G13D)
LVVMAHDVG

SEQ ID NO: 90526 - protein, 9 aa, synthetic construct
  source 1..9: note = Seed: VVVGAGDVG (KRAS G13D)
LVVMAHDVH

SEQ ID NO: 90527 - protein, 9 aa, synthetic construct
  source 1..9: note = Seed: VVVGAGDVG (KRAS G13D)
LVVMAHDVI

SEQ ID NO: 90528 - protein, 9 aa, synthetic construct
  source 1..9: note = Seed: VVVGAGDVG (KRAS G13D)
LVVMAHDVL

SEQ ID NO: 90529 - protein, 9 aa, synthetic construct
  source 1..9: note = Seed: VVVGAGDVG (KRAS G13D)
LVVMAHDVM

SEQ ID NO: 90530 - protein, 9 aa, synthetic construct
  source 1..9: note = Seed: VVVGAGDVG (KRAS G13D)
LVVMAHDVN

SEQ ID NO: 90531 - protein, 9 aa, synthetic construct
  source 1..9: note = Seed: VVVGAGDVG (KRAS G13D)
LVVMAHDVQ

SEQ ID NO: 90532 - protein, 9 aa, synthetic construct
  source 1..9: note = Seed: VVVGAGDVG (KRAS G13D)
LVVMAHDVS

SEQ ID NO: 90533 - protein, 9 aa, synthetic construct
  source 1..9: note = Seed: VVVGAGDVG (KRAS G13D)
LVVMAHDVT

SEQ ID NO: 90534 - protein, 9 aa, synthetic construct
  source 1..9: note = Seed: VVVGAGDVG (KRAS G13D)
LVVMAHDVV

SEQ ID NO: 90535 - protein, 9 aa, synthetic construct
  source 1..9: note = Seed: VVVGAGDVG (KRAS G13D)
LVVMAIDVA

SEQ ID NO: 90536 - protein, 9 aa, synthetic construct
  source 1..9: note = Seed: VVVGAGDVG (KRAS G13D)
LVVMAIDVD

SEQ ID NO: 90537 - protein, 9 aa, synthetic construct
  source 1..9: note = Seed: VVVGAGDVG (KRAS G13D)
LVVMAIDVE

SEQ ID NO: 90538 - protein, 9 aa, synthetic construct
  source 1..9: note = Seed: VVVGAGDVG (KRAS G13D)
LVVMAIDVG

SEQ ID NO: 90539 - protein, 9 aa, synthetic construct
  source 1..9: note = Seed: VVVGAGDVG (KRAS G13D)
LVVMAIDVH

SEQ ID NO: 90540 - protein, 9 aa, synthetic construct
  source 1..9: note = Seed: VVVGAGDVG (KRAS G13D)
LVVMAIDVI

SEQ ID NO: 90541 - protein, 9 aa, synthetic construct
  source 1..9: note = Seed: VVVGAGDVG (KRAS G13D)
LVVMAIDVK

SEQ ID NO: 90542 - protein, 9 aa, synthetic construct
  source 1..9: note = Seed: VVVGAGDVG (KRAS G13D)
LVVMAIDVL

SEQ ID NO: 90543 - protein, 9 aa, synthetic construct
  source 1..9: note = Seed: VVVGAGDVG (KRAS G13D)
LVVMAIDVM

SEQ ID NO: 90544 - protein, 9 aa, synthetic construct
  source 1..9: note = Seed: VVVGAGDVG (KRAS G13D)
LVVMAIDVN

SEQ ID NO: 90545 - protein, 9 aa, synthetic construct
  source 1..9: note = Seed: VVVGAGDVG (KRAS G13D)
LVVMAIDVQ

SEQ ID NO: 90546 - protein, 9 aa, synthetic construct
  source 1..9: note = Seed: VVVGAGDVG (KRAS G13D)
LVVMAIDVR

SEQ ID NO: 90547 - protein, 9 aa, synthetic construct
  source 1..9: note = Seed: VVVGAGDVG (KRAS G13D)
LVVMAIDVS

SEQ ID NO: 90548 - protein, 9 aa, synthetic construct
  source 1..9: note = Seed: VVVGAGDVG (KRAS G13D)
LVVMAIDVT

SEQ ID NO: 90549 - protein, 9 aa, synthetic construct
  source 1..9: note = Seed: VVVGAGDVG (KRAS G13D)
LVVMAIDVV

SEQ ID NO: 90550 - protein, 9 aa, synthetic construct
  source 1..9: note = Seed: VVVGAGDVG (KRAS G13D)
LVVMAIDVY

SEQ ID NO: 90551 - protein, 9 aa, synthetic construct
  source 1..9: note = Seed: VVVGAGDVG (KRAS G13D)
LVVMAKDVA

SEQ ID NO: 90552 - protein, 9 aa, synthetic construct
  source 1..9: note = Seed: VVVGAGDVG (KRAS G13D)
LVVMALDVA

SEQ ID NO: 90553 - protein, 9 aa, synthetic construct
  source 1..9: note = Seed: VVVGAGDVG (KRAS G13D)
LVVMALDVE

SEQ ID NO: 90554 - protein, 9 aa, synthetic construct
  source 1..9: note = Seed: VVVGAGDVG (KRAS G13D)
LVVMALDVG

SEQ ID NO: 90555 - protein, 9 aa, synthetic construct
  source 1..9: note = Seed: VVVGAGDVG (KRAS G13D)
LVVMALDVH

SEQ ID NO: 90556 - protein, 9 aa, synthetic construct
  source 1..9: note = Seed: VVVGAGDVG (KRAS G13D)
LVVMALDVI

SEQ ID NO: 90557 - protein, 9 aa, synthetic construct
  source 1..9: note = Seed: VVVGAGDVG (KRAS G13D)
LVVMALDVQ

SEQ ID NO: 90558 - protein, 9 aa, synthetic construct
  source 1..9: note = Seed: VVVGAGDVG (KRAS G13D)
LVVMALDVS

SEQ ID NO: 90559 - protein, 9 aa, synthetic construct
  source 1..9: note = Seed: VVVGAGDVG (KRAS G13D)
LVVMALDVV

SEQ ID NO: 90560 - protein, 9 aa, synthetic construct
  source 1..9: note = Seed: VVVGAGDVG (KRAS G13D)
LVVMALDVY

SEQ ID NO: 90561 - protein, 9 aa, synthetic construct
  source 1..9: note = Seed: VVVGAGDVG (KRAS G13D)
LVVMAMDVA

SEQ ID NO: 90562 - protein, 9 aa, synthetic construct
  source 1..9: note = Seed: VVVGAGDVG (KRAS G13D)
LVVMAMDVG

SEQ ID NO: 90563 - protein, 9 aa, synthetic construct
  source 1..9: note = Seed: VVVGAGDVG (KRAS G13D)
LVVMAMDVS

SEQ ID NO: 90564 - protein, 9 aa, synthetic construct
  source 1..9: note = Seed: VVVGAGDVG (KRAS G13D)
LVVMANDVA

SEQ ID NO: 90565 - protein, 9 aa, synthetic construct
  source 1..9: note = Seed: VVVGAGDVG (KRAS G13D)
LVVMANDVC

SEQ ID NO: 90566 - protein, 9 aa, synthetic construct
  source 1..9: note = Seed: VVVGAGDVG (KRAS G13D)
LVVMANDVD

SEQ ID NO: 90567 - protein, 9 aa, synthetic construct
  source 1..9: note = Seed: VVVGAGDVG (KRAS G13D)
LVVMANDVE

SEQ ID NO: 90568 - protein, 9 aa, synthetic construct
  source 1..9: note = Seed: VVVGAGDVG (KRAS G13D)
LVVMANDVF

SEQ ID NO: 90569 - protein, 9 aa, synthetic construct
  source 1..9: note = Seed: VVVGAGDVG (KRAS G13D)
LVVMANDVG

SEQ ID NO: 90570 - protein, 9 aa, synthetic construct
  source 1..9: note = Seed: VVVGAGDVG (KRAS G13D)
LVVMANDVH

SEQ ID NO: 90571 - protein, 9 aa, synthetic construct
  source 1..9: note = Seed: VVVGAGDVG (KRAS G13D)
LVVMANDVI

SEQ ID NO: 90572 - protein, 9 aa, synthetic construct
  source 1..9: note = Seed: VVVGAGDVG (KRAS G13D)
LVVMANDVK

SEQ ID NO: 90573 - protein, 9 aa, synthetic construct
  source 1..9: note = Seed: VVVGAGDVG (KRAS G13D)
LVVMANDVL

SEQ ID NO: 90574 - protein, 9 aa, synthetic construct
  source 1..9: note = Seed: VVVGAGDVG (KRAS G13D)
LVVMANDVM

SEQ ID NO: 90575 - protein, 9 aa, synthetic construct
  source 1..9: note = Seed: VVVGAGDVG (KRAS G13D)
LVVMANDVN

SEQ ID NO: 90576 - protein, 9 aa, synthetic construct
  source 1..9: note = Seed: VVVGAGDVG (KRAS G13D)
LVVMANDVP

SEQ ID NO: 90577 - protein, 9 aa, synthetic construct
  source 1..9: note = Seed: VVVGAGDVG (KRAS G13D)
LVVMANDVQ

SEQ ID NO: 90578 - protein, 9 aa, synthetic construct
  source 1..9: note = Seed: VVVGAGDVG (KRAS G13D)
LVVMANDVR

SEQ ID NO: 90579 - protein, 9 aa, synthetic construct
  source 1..9: note = Seed: VVVGAGDVG (KRAS G13D)
LVVMANDVS

SEQ ID NO: 90580 - protein, 9 aa, synthetic construct
  source 1..9: note = Seed: VVVGAGDVG (KRAS G13D)
LVVMANDVT

SEQ ID NO: 90581 - protein, 9 aa, synthetic construct
  source 1..9: note = Seed: VVVGAGDVG (KRAS G13D)
LVVMANDVV

SEQ ID NO: 90582 - protein, 9 aa, synthetic construct
  source 1..9: note = Seed: VVVGAGDVG (KRAS G13D)
LVVMANDVW

SEQ ID NO: 90583 - protein, 9 aa, synthetic construct
  source 1..9: note = Seed: VVVGAGDVG (KRAS G13D)
LVVMANDVY

SEQ ID NO: 90584 - protein, 9 aa, synthetic construct
  source 1..9: note = Seed: VVVGAGDVG (KRAS G13D)
LVVMAPDVA

SEQ ID NO: 90585 - protein, 9 aa, synthetic construct
  source 1..9: note = Seed: VVVGAGDVG (KRAS G13D)
LVVMAPDVC

SEQ ID NO: 90586 - protein, 9 aa, synthetic construct
  source 1..9: note = Seed: VVVGAGDVG (KRAS G13D)
LVVMAPDVD

SEQ ID NO: 90587 - protein, 9 aa, synthetic construct
  source 1..9: note = Seed: VVVGAGDVG (KRAS G13D)
LVVMAPDVE

SEQ ID NO: 90588 - protein, 9 aa, synthetic construct
  source 1..9: note = Seed: VVVGAGDVG (KRAS G13D)
LVVMAPDVF

SEQ ID NO: 90589 - protein, 9 aa, synthetic construct
  source 1..9: note = Seed: VVVGAGDVG (KRAS G13D)
LVVMAPDVG

SEQ ID NO: 90590 - protein, 9 aa, synthetic construct
  source 1..9: note = Seed: VVVGAGDVG (KRAS G13D)
LVVMAPDVH

SEQ ID NO: 90591 - protein, 9 aa, synthetic construct
  source 1..9: note = Seed: VVVGAGDVG (KRAS G13D)
LVVMAPDVI

SEQ ID NO: 90592 - protein, 9 aa, synthetic construct
  source 1..9: note = Seed: VVVGAGDVG (KRAS G13D)
LVVMAPDVK

SEQ ID NO: 90593 - protein, 9 aa, synthetic construct
  source 1..9: note = Seed: VVVGAGDVG (KRAS G13D)
LVVMAPDVL

SEQ ID NO: 90594 - protein, 9 aa, synthetic construct
  source 1..9: note = Seed: VVVGAGDVG (KRAS G13D)
LVVMAPDVM

SEQ ID NO: 90595 - protein, 9 aa, synthetic construct
  source 1..9: note = Seed: VVVGAGDVG (KRAS G13D)
LVVMAPDVN

SEQ ID NO: 90596 - protein, 9 aa, synthetic construct
  source 1..9: note = Seed: VVVGAGDVG (KRAS G13D)
LVVMAPDVP

SEQ ID NO: 90597 - protein, 9 aa, synthetic construct
  source 1..9: note = Seed: VVVGAGDVG (KRAS G13D)
LVVMAPDVQ

SEQ ID NO: 90598 - protein, 9 aa, synthetic construct
  source 1..9: note = Seed: VVVGAGDVG (KRAS G13D)
LVVMAPDVR

SEQ ID NO: 90599 - protein, 9 aa, synthetic construct
  source 1..9: note = Seed: VVVGAGDVG (KRAS G13D)
LVVMAPDVS

SEQ ID NO: 90600 - protein, 9 aa, synthetic construct
  source 1..9: note = Seed: VVVGAGDVG (KRAS G13D)
LVVMAPDVT

SEQ ID NO: 90601 - protein, 9 aa, synthetic construct
  source 1..9: note = Seed: VVVGAGDVG (KRAS G13D)
LVVMAPDVV

SEQ ID NO: 90602 - protein, 9 aa, synthetic construct
  source 1..9: note = Seed: VVVGAGDVG (KRAS G13D)
LVVMAPDVW

SEQ ID NO: 90603 - protein, 9 aa, synthetic construct
  source 1..9: note = Seed: VVVGAGDVG (KRAS G13D)
LVVMAPDVY

SEQ ID NO: 90604 - protein, 9 aa, synthetic construct
  source 1..9: note = Seed: VVVGAGDVG (KRAS G13D)
LVVMAQDVA

SEQ ID NO: 90605 - protein, 9 aa, synthetic construct
  source 1..9: note = Seed: VVVGAGDVG (KRAS G13D)
LVVMAQDVI

SEQ ID NO: 90606 - protein, 9 aa, synthetic construct
  source 1..9: note = Seed: VVVGAGDVG (KRAS G13D)
LVVMAQDVM

SEQ ID NO: 90607 - protein, 9 aa, synthetic construct
  source 1..9: note = Seed: VVVGAGDVG (KRAS G13D)
LVVMAQDVN

SEQ ID NO: 90608 - protein, 9 aa, synthetic construct
  source 1..9: note = Seed: VVVGAGDVG (KRAS G13D)
LVVMAQDVS

SEQ ID NO: 90609 - protein, 9 aa, synthetic construct
  source 1..9: note = Seed: VVVGAGDVG (KRAS G13D)
LVVMAQDVT

SEQ ID NO: 90610 - protein, 9 aa, synthetic construct
  source 1..9: note = Seed: VVVGAGDVG (KRAS G13D)
LVVMAQDVV

SEQ ID NO: 90611 - protein, 9 aa, synthetic construct
  source 1..9: note = Seed: VVVGAGDVG (KRAS G13D)
LVVMARDVA

SEQ ID NO: 90612 - protein, 9 aa, synthetic construct
  source 1..9: note = Seed: VVVGAGDVG (KRAS G13D)
LVVMARDVN

SEQ ID NO: 90613 - protein, 9 aa, synthetic construct
  source 1..9: note = Seed: VVVGAGDVG (KRAS G13D)
LVVMARDVQ

SEQ ID NO: 90614 - protein, 9 aa, synthetic construct
  source 1..9: note = Seed: VVVGAGDVG (KRAS G13D)
LVVMARDVS

SEQ ID NO: 90615 - protein, 9 aa, synthetic construct
  source 1..9: note = Seed: VVVGAGDVG (KRAS G13D)
LVVMARDVV

SEQ ID NO: 90616 - protein, 9 aa, synthetic construct
  source 1..9: note = Seed: VVVGAGDVG (KRAS G13D)
LVVMASDVA

SEQ ID NO: 90617 - protein, 9 aa, synthetic construct
  source 1..9: note = Seed: VVVGAGDVG (KRAS G13D)
LVVMASDVC

SEQ ID NO: 90618 - protein, 9 aa, synthetic construct
  source 1..9: note = Seed: VVVGAGDVG (KRAS G13D)
LVVMASDVD

SEQ ID NO: 90619 - protein, 9 aa, synthetic construct
  source 1..9: note = Seed: VVVGAGDVG (KRAS G13D)
LVVMASDVE

SEQ ID NO: 90620 - protein, 9 aa, synthetic construct
  source 1..9: note = Seed: VVVGAGDVG (KRAS G13D)
LVVMASDVF

SEQ ID NO: 90621 - protein, 9 aa, synthetic construct
  source 1..9: note = Seed: VVVGAGDVG (KRAS G13D)
LVVMASDVG

SEQ ID NO: 90622 - protein, 9 aa, synthetic construct
  source 1..9: note = Seed: VVVGAGDVG (KRAS G13D)
LVVMASDVH

SEQ ID NO: 90623 - protein, 9 aa, synthetic construct
  source 1..9: note = Seed: VVVGAGDVG (KRAS G13D)
LVVMASDVI

SEQ ID NO: 90624 - protein, 9 aa, synthetic construct
  source 1..9: note = Seed: VVVGAGDVG (KRAS G13D)
LVVMASDVK

SEQ ID NO: 90625 - protein, 9 aa, synthetic construct
  source 1..9: note = Seed: VVVGAGDVG (KRAS G13D)
LVVMASDVL

SEQ ID NO: 90626 - protein, 9 aa, synthetic construct
  source 1..9: note = Seed: VVVGAGDVG (KRAS G13D)
LVVMASDVM

SEQ ID NO: 90627 - protein, 9 aa, synthetic construct
  source 1..9: note = Seed: VVVGAGDVG (KRAS G13D)
LVVMASDVN

SEQ ID NO: 90628 - protein, 9 aa, synthetic construct
  source 1..9: note = Seed: VVVGAGDVG (KRAS G13D)
LVVMASDVP

SEQ ID NO: 90629 - protein, 9 aa, synthetic construct
  source 1..9: note = Seed: VVVGAGDVG (KRAS G13D)
LVVMASDVQ

SEQ ID NO: 90630 - protein, 9 aa, synthetic construct
  source 1..9: note = Seed: VVVGAGDVG (KRAS G13D)
LVVMASDVR

SEQ ID NO: 90631 - protein, 9 aa, synthetic construct
  source 1..9: note = Seed: VVVGAGDVG (KRAS G13D)
LVVMASDVS

SEQ ID NO: 90632 - protein, 9 aa, synthetic construct
  source 1..9: note = Seed: VVVGAGDVG (KRAS G13D)
LVVMASDVT

SEQ ID NO: 90633 - protein, 9 aa, synthetic construct
  source 1..9: note = Seed: VVVGAGDVG (KRAS G13D)
LVVMASDVV

SEQ ID NO: 90634 - protein, 9 aa, synthetic construct
  source 1..9: note = Seed: VVVGAGDVG (KRAS G13D)
LVVMASDVW

SEQ ID NO: 90635 - protein, 9 aa, synthetic construct
  source 1..9: note = Seed: VVVGAGDVG (KRAS G13D)
LVVMASDVY

SEQ ID NO: 90636 - protein, 9 aa, synthetic construct
  source 1..9: note = Seed: VVVGAGDVG (KRAS G13D)
LVVMATDVA

SEQ ID NO: 90637 - protein, 9 aa, synthetic construct
  source 1..9: note = Seed: VVVGAGDVG (KRAS G13D)
LVVMATDVD

SEQ ID NO: 90638 - protein, 9 aa, synthetic construct
  source 1..9: note = Seed: VVVGAGDVG (KRAS G13D)
LVVMATDVE

SEQ ID NO: 90639 - protein, 9 aa, synthetic construct
  source 1..9: note = Seed: VVVGAGDVG (KRAS G13D)
LVVMATDVF

SEQ ID NO: 90640 - protein, 9 aa, synthetic construct
  source 1..9: note = Seed: VVVGAGDVG (KRAS G13D)
LVVMATDVG

SEQ ID NO: 90641 - protein, 9 aa, synthetic construct
  source 1..9: note = Seed: VVVGAGDVG (KRAS G13D)
LVVMATDVH

SEQ ID NO: 90642 - protein, 9 aa, synthetic construct
  source 1..9: note = Seed: VVVGAGDVG (KRAS G13D)
LVVMATDVI

SEQ ID NO: 90643 - protein, 9 aa, synthetic construct
  source 1..9: note = Seed: VVVGAGDVG (KRAS G13D)
LVVMATDVK

SEQ ID NO: 90644 - protein, 9 aa, synthetic construct
  source 1..9: note = Seed: VVVGAGDVG (KRAS G13D)
LVVMATDVL

SEQ ID NO: 90645 - protein, 9 aa, synthetic construct
  source 1..9: note = Seed: VVVGAGDVG (KRAS G13D)
LVVMATDVM

SEQ ID NO: 90646 - protein, 9 aa, synthetic construct
  source 1..9: note = Seed: VVVGAGDVG (KRAS G13D)
LVVMATDVN

SEQ ID NO: 90647 - protein, 9 aa, synthetic construct
  source 1..9: note = Seed: VVVGAGDVG (KRAS G13D)
LVVMATDVP

SEQ ID NO: 90648 - protein, 9 aa, synthetic construct
  source 1..9: note = Seed: VVVGAGDVG (KRAS G13D)
LVVMATDVQ

SEQ ID NO: 90649 - protein, 9 aa, synthetic construct
  source 1..9: note = Seed: VVVGAGDVG (KRAS G13D)
LVVMATDVR

SEQ ID NO: 90650 - protein, 9 aa, synthetic construct
  source 1..9: note = Seed: VVVGAGDVG (KRAS G13D)
LVVMATDVS

SEQ ID NO: 90651 - protein, 9 aa, synthetic construct
  source 1..9: note = Seed: VVVGAGDVG (KRAS G13D)
LVVMATDVT

SEQ ID NO: 90652 - protein, 9 aa, synthetic construct
  source 1..9: note = Seed: VVVGAGDVG (KRAS G13D)
LVVMATDVV

SEQ ID NO: 90653 - protein, 9 aa, synthetic construct
  source 1..9: note = Seed: VVVGAGDVG (KRAS G13D)
LVVMATDVY

SEQ ID NO: 90654 - protein, 9 aa, synthetic construct
  source 1..9: note = Seed: VVVGAGDVG (KRAS G13D)
LVVMAVDVA

SEQ ID NO: 90655 - protein, 9 aa, synthetic construct
  source 1..9: note = Seed: VVVGAGDVG (KRAS G13D)
LVVMAVDVD

SEQ ID NO: 90656 - protein, 9 aa, synthetic construct
  source 1..9: note = Seed: VVVGAGDVG (KRAS G13D)
LVVMAVDVE

SEQ ID NO: 90657 - protein, 9 aa, synthetic construct
  source 1..9: note = Seed: VVVGAGDVG (KRAS G13D)
LVVMAVDVG

SEQ ID NO: 90658 - protein, 9 aa, synthetic construct
  source 1..9: note = Seed: VVVGAGDVG (KRAS G13D)
LVVMAVDVH

SEQ ID NO: 90659 - protein, 9 aa, synthetic construct
  source 1..9: note = Seed: VVVGAGDVG (KRAS G13D)
LVVMAVDVI

SEQ ID NO: 90660 - protein, 9 aa, synthetic construct
  source 1..9: note = Seed: VVVGAGDVG (KRAS G13D)
LVVMAVDVK

SEQ ID NO: 90661 - protein, 9 aa, synthetic construct
  source 1..9: note = Seed: VVVGAGDVG (KRAS G13D)
LVVMAVDVL

SEQ ID NO: 90662 - protein, 9 aa, synthetic construct
  source 1..9: note = Seed: VVVGAGDVG (KRAS G13D)
LVVMAVDVM

SEQ ID NO: 90663 - protein, 9 aa, synthetic construct
  source 1..9: note = Seed: VVVGAGDVG (KRAS G13D)
LVVMAVDVN

SEQ ID NO: 90664 - protein, 9 aa, synthetic construct
  source 1..9: note = Seed: VVVGAGDVG (KRAS G13D)
LVVMAVDVP

SEQ ID NO: 90665 - protein, 9 aa, synthetic construct
  source 1..9: note = Seed: VVVGAGDVG (KRAS G13D)
LVVMAVDVQ

SEQ ID NO: 90666 - protein, 9 aa, synthetic construct
  source 1..9: note = Seed: VVVGAGDVG (KRAS G13D)
LVVMAVDVR

SEQ ID NO: 90667 - protein, 9 aa, synthetic construct
  source 1..9: note = Seed: VVVGAGDVG (KRAS G13D)
LVVMAVDVS

SEQ ID NO: 90668 - protein, 9 aa, synthetic construct
  source 1..9: note = Seed: VVVGAGDVG (KRAS G13D)
LVVMAVDVT

SEQ ID NO: 90669 - protein, 9 aa, synthetic construct
  source 1..9: note = Seed: VVVGAGDVG (KRAS G13D)
LVVMAVDVV

SEQ ID NO: 90670 - protein, 9 aa, synthetic construct
  source 1..9: note = Seed: VVVGAGDVG (KRAS G13D)
LVVMAVDVY

SEQ ID NO: 90671 - protein, 9 aa, synthetic construct
  source 1..9: note = Seed: VVVGAGDVG (KRAS G13D)
LVVNAADVA

SEQ ID NO: 90672 - protein, 9 aa, synthetic construct
  source 1..9: note = Seed: VVVGAGDVG (KRAS G13D)
LVVNAADVC

SEQ ID NO: 90673 - protein, 9 aa, synthetic construct
  source 1..9: note = Seed: VVVGAGDVG (KRAS G13D)
LVVNAADVD

SEQ ID NO: 90674 - protein, 9 aa, synthetic construct
  source 1..9: note = Seed: VVVGAGDVG (KRAS G13D)
LVVNAADVE

SEQ ID NO: 90675 - protein, 9 aa, synthetic construct
  source 1..9: note = Seed: VVVGAGDVG (KRAS G13D)
LVVNAADVG

SEQ ID NO: 90676 - protein, 9 aa, synthetic construct
  source 1..9: note = Seed: VVVGAGDVG (KRAS G13D)
LVVNAADVH

SEQ ID NO: 90677 - protein, 9 aa, synthetic construct
  source 1..9: note = Seed: VVVGAGDVG (KRAS G13D)
LVVNAADVI

SEQ ID NO: 90678 - protein, 9 aa, synthetic construct
  source 1..9: note = Seed: VVVGAGDVG (KRAS G13D)
LVVNAADVL

SEQ ID NO: 90679 - protein, 9 aa, synthetic construct
  source 1..9: note = Seed: VVVGAGDVG (KRAS G13D)
LVVNAADVM

SEQ ID NO: 90680 - protein, 9 aa, synthetic construct
  source 1..9: note = Seed: VVVGAGDVG (KRAS G13D)
LVVNAADVN

SEQ ID NO: 90681 - protein, 9 aa, synthetic construct
  source 1..9: note = Seed: VVVGAGDVG (KRAS G13D)
LVVNAADVQ

SEQ ID NO: 90682 - protein, 9 aa, synthetic construct
  source 1..9: note = Seed: VVVGAGDVG (KRAS G13D)
LVVNAADVS

SEQ ID NO: 90683 - protein, 9 aa, synthetic construct
  source 1..9: note = Seed: VVVGAGDVG (KRAS G13D)
LVVNAADVT

SEQ ID NO: 90684 - protein, 9 aa, synthetic construct
  source 1..9: note = Seed: VVVGAGDVG (KRAS G13D)
LVVNAADVV

SEQ ID NO: 90685 - protein, 9 aa, synthetic construct
  source 1..9: note = Seed: VVVGAGDVG (KRAS G13D)
LVVNAADVY

SEQ ID NO: 90686 - protein, 9 aa, synthetic construct
  source 1..9: note = Seed: VVVGAGDVG (KRAS G13D)
LVVNADDVA

SEQ ID NO: 90687 - protein, 9 aa, synthetic construct
  source 1..9: note = Seed: VVVGAGDVG (KRAS G13D)
LVVNADDVI

SEQ ID NO: 90688 - protein, 9 aa, synthetic construct
  source 1..9: note = Seed: VVVGAGDVG (KRAS G13D)
LVVNADDVL

SEQ ID NO: 90689 - protein, 9 aa, synthetic construct
  source 1..9: note = Seed: VVVGAGDVG (KRAS G13D)
LVVNADDVS

SEQ ID NO: 90690 - protein, 9 aa, synthetic construct
  source 1..9: note = Seed: VVVGAGDVG (KRAS G13D)
LVVNADDVV

SEQ ID NO: 90691 - protein, 9 aa, synthetic construct
  source 1..9: note = Seed: VVVGAGDVG (KRAS G13D)
LVVNAGDVA

SEQ ID NO: 90692 - protein, 9 aa, synthetic construct
  source 1..9: note = Seed: VVVGAGDVG (KRAS G13D)
LVVNAGDVE

SEQ ID NO: 90693 - protein, 9 aa, synthetic construct
  source 1..9: note = Seed: VVVGAGDVG (KRAS G13D)
LVVNAGDVH

SEQ ID NO: 90694 - protein, 9 aa, synthetic construct
  source 1..9: note = Seed: VVVGAGDVG (KRAS G13D)
LVVNAGDVI

SEQ ID NO: 90695 - protein, 9 aa, synthetic construct
  source 1..9: note = Seed: VVVGAGDVG (KRAS G13D)
LVVNAGDVL

SEQ ID NO: 90696 - protein, 9 aa, synthetic construct
  source 1..9: note = Seed: VVVGAGDVG (KRAS G13D)
LVVNAGDVM

SEQ ID NO: 90697 - protein, 9 aa, synthetic construct
  source 1..9: note = Seed: VVVGAGDVG (KRAS G13D)
LVVNAGDVN

SEQ ID NO: 90698 - protein, 9 aa, synthetic construct
  source 1..9: note = Seed: VVVGAGDVG (KRAS G13D)
LVVNAGDVQ

SEQ ID NO: 90699 - protein, 9 aa, synthetic construct
  source 1..9: note = Seed: VVVGAGDVG (KRAS G13D)
LVVNAGDVS

SEQ ID NO: 90700 - protein, 9 aa, synthetic construct
  source 1..9: note = Seed: VVVGAGDVG (KRAS G13D)
LVVNAGDVT

SEQ ID NO: 90701 - protein, 9 aa, synthetic construct
  source 1..9: note = Seed: VVVGAGDVG (KRAS G13D)
LVVNAGDVV

SEQ ID NO: 90702 - protein, 9 aa, synthetic construct
  source 1..9: note = Seed: VVVGAGDVG (KRAS G13D)
LVVNAIDVA

SEQ ID NO: 90703 - protein, 9 aa, synthetic construct
  source 1..9: note = Seed: VVVGAGDVG (KRAS G13D)
LVVNAIDVF

SEQ ID NO: 90704 - protein, 9 aa, synthetic construct
  source 1..9: note = Seed: VVVGAGDVG (KRAS G13D)
LVVNAIDVI

SEQ ID NO: 90705 - protein, 9 aa, synthetic construct
  source 1..9: note = Seed: VVVGAGDVG (KRAS G13D)
LVVNAIDVL

SEQ ID NO: 90706 - protein, 9 aa, synthetic construct
  source 1..9: note = Seed: VVVGAGDVG (KRAS G13D)
LVVNAIDVM

SEQ ID NO: 90707 - protein, 9 aa, synthetic construct
  source 1..9: note = Seed: VVVGAGDVG (KRAS G13D)
LVVNAIDVQ

SEQ ID NO: 90708 - protein, 9 aa, synthetic construct
  source 1..9: note = Seed: VVVGAGDVG (KRAS G13D)
LVVNAIDVS

SEQ ID NO: 90709 - protein, 9 aa, synthetic construct
  source 1..9: note = Seed: VVVGAGDVG (KRAS G13D)
LVVNAIDVV

SEQ ID NO: 90710 - protein, 9 aa, synthetic construct
  source 1..9: note = Seed: VVVGAGDVG (KRAS G13D)
LVVNALDVA

SEQ ID NO: 90711 - protein, 9 aa, synthetic construct
  source 1..9: note = Seed: VVVGAGDVG (KRAS G13D)
LVVNALDVE

SEQ ID NO: 90712 - protein, 9 aa, synthetic construct
  source 1..9: note = Seed: VVVGAGDVG (KRAS G13D)
LVVNALDVF

SEQ ID NO: 90713 - protein, 9 aa, synthetic construct
  source 1..9: note = Seed: VVVGAGDVG (KRAS G13D)
LVVNALDVI

SEQ ID NO: 90714 - protein, 9 aa, synthetic construct
  source 1..9: note = Seed: VVVGAGDVG (KRAS G13D)
LVVNALDVL

SEQ ID NO: 90715 - protein, 9 aa, synthetic construct
  source 1..9: note = Seed: VVVGAGDVG (KRAS G13D)
LVVNALDVM

SEQ ID NO: 90716 - protein, 9 aa, synthetic construct
  source 1..9: note = Seed: VVVGAGDVG (KRAS G13D)
LVVNALDVQ

SEQ ID NO: 90717 - protein, 9 aa, synthetic construct
  source 1..9: note = Seed: VVVGAGDVG (KRAS G13D)
LVVNALDVS

SEQ ID NO: 90718 - protein, 9 aa, synthetic construct
  source 1..9: note = Seed: VVVGAGDVG (KRAS G13D)
LVVNALDVV

SEQ ID NO: 90719 - protein, 9 aa, synthetic construct
  source 1..9: note = Seed: VVVGAGDVG (KRAS G13D)
LVVNALDVY

SEQ ID NO: 90720 - protein, 9 aa, synthetic construct
  source 1..9: note = Seed: VVVGAGDVG (KRAS G13D)
LVVNAMDVA

SEQ ID NO: 90721 - protein, 9 aa, synthetic construct
  source 1..9: note = Seed: VVVGAGDVG (KRAS G13D)
LVVNAMDVI

SEQ ID NO: 90722 - protein, 9 aa, synthetic construct
  source 1..9: note = Seed: VVVGAGDVG (KRAS G13D)
LVVNAMDVL

SEQ ID NO: 90723 - protein, 9 aa, synthetic construct
  source 1..9: note = Seed: VVVGAGDVG (KRAS G13D)
LVVNAMDVM

SEQ ID NO: 90724 - protein, 9 aa, synthetic construct
  source 1..9: note = Seed: VVVGAGDVG (KRAS G13D)
LVVNAMDVS

SEQ ID NO: 90725 - protein, 9 aa, synthetic construct
  source 1..9: note = Seed: VVVGAGDVG (KRAS G13D)
LVVNAMDVV

SEQ ID NO: 90726 - protein, 9 aa, synthetic construct
  source 1..9: note = Seed: VVVGAGDVG (KRAS G13D)
LVVNANDVA

SEQ ID NO: 90727 - protein, 9 aa, synthetic construct
  source 1..9: note = Seed: VVVGAGDVG (KRAS G13D)
LVVNANDVC

SEQ ID NO: 90728 - protein, 9 aa, synthetic construct
  source 1..9: note = Seed: VVVGAGDVG (KRAS G13D)
LVVNANDVG

SEQ ID NO: 90729 - protein, 9 aa, synthetic construct
  source 1..9: note = Seed: VVVGAGDVG (KRAS G13D)
LVVNANDVH

SEQ ID NO: 90730 - protein, 9 aa, synthetic construct
  source 1..9: note = Seed: VVVGAGDVG (KRAS G13D)
LVVNANDVI

SEQ ID NO: 90731 - protein, 9 aa, synthetic construct
  source 1..9: note = Seed: VVVGAGDVG (KRAS G13D)
LVVNANDVL

SEQ ID NO: 90732 - protein, 9 aa, synthetic construct
  source 1..9: note = Seed: VVVGAGDVG (KRAS G13D)
LVVNANDVM

SEQ ID NO: 90733 - protein, 9 aa, synthetic construct
  source 1..9: note = Seed: VVVGAGDVG (KRAS G13D)
LVVNANDVN

SEQ ID NO: 90734 - protein, 9 aa, synthetic construct
  source 1..9: note = Seed: VVVGAGDVG (KRAS G13D)
LVVNANDVQ

SEQ ID NO: 90735 - protein, 9 aa, synthetic construct
  source 1..9: note = Seed: VVVGAGDVG (KRAS G13D)
LVVNANDVS

SEQ ID NO: 90736 - protein, 9 aa, synthetic construct
  source 1..9: note = Seed: VVVGAGDVG (KRAS G13D)
LVVNANDVT

SEQ ID NO: 90737 - protein, 9 aa, synthetic construct
  source 1..9: note = Seed: VVVGAGDVG (KRAS G13D)
LVVNANDVV

SEQ ID NO: 90738 - protein, 9 aa, synthetic construct
  source 1..9: note = Seed: VVVGAGDVG (KRAS G13D)
LVVNAPDVA

SEQ ID NO: 90739 - protein, 9 aa, synthetic construct
  source 1..9: note = Seed: VVVGAGDVG (KRAS G13D)
LVVNAPDVL

SEQ ID NO: 90740 - protein, 9 aa, synthetic construct
  source 1..9: note = Seed: VVVGAGDVG (KRAS G13D)
LVVNAPDVS

SEQ ID NO: 90741 - protein, 9 aa, synthetic construct
  source 1..9: note = Seed: VVVGAGDVG (KRAS G13D)
LVVNASDVA

SEQ ID NO: 90742 - protein, 9 aa, synthetic construct
  source 1..9: note = Seed: VVVGAGDVG (KRAS G13D)
LVVNASDVC

SEQ ID NO: 90743 - protein, 9 aa, synthetic construct
  source 1..9: note = Seed: VVVGAGDVG (KRAS G13D)
LVVNASDVD

SEQ ID NO: 90744 - protein, 9 aa, synthetic construct
  source 1..9: note = Seed: VVVGAGDVG (KRAS G13D)
LVVNASDVG

SEQ ID NO: 90745 - protein, 9 aa, synthetic construct
  source 1..9: note = Seed: VVVGAGDVG (KRAS G13D)
LVVNASDVH

SEQ ID NO: 90746 - protein, 9 aa, synthetic construct
  source 1..9: note = Seed: VVVGAGDVG (KRAS G13D)
LVVNASDVI

SEQ ID NO: 90747 - protein, 9 aa, synthetic construct
  source 1..9: note = Seed: VVVGAGDVG (KRAS G13D)
LVVNASDVL

SEQ ID NO: 90748 - protein, 9 aa, synthetic construct
  source 1..9: note = Seed: VVVGAGDVG (KRAS G13D)
LVVNASDVM

SEQ ID NO: 90749 - protein, 9 aa, synthetic construct
  source 1..9: note = Seed: VVVGAGDVG (KRAS G13D)
LVVNASDVN

SEQ ID NO: 90750 - protein, 9 aa, synthetic construct
  source 1..9: note = Seed: VVVGAGDVG (KRAS G13D)
LVVNASDVQ

SEQ ID NO: 90751 - protein, 9 aa, synthetic construct
  source 1..9: note = Seed: VVVGAGDVG (KRAS G13D)
LVVNASDVS

SEQ ID NO: 90752 - protein, 9 aa, synthetic construct
  source 1..9: note = Seed: VVVGAGDVG (KRAS G13D)
LVVNASDVT

SEQ ID NO: 90753 - protein, 9 aa, synthetic construct
  source 1..9: note = Seed: VVVGAGDVG (KRAS G13D)
LVVNASDVV

SEQ ID NO: 90754 - protein, 9 aa, synthetic construct
  source 1..9: note = Seed: VVVGAGDVG (KRAS G13D)
LVVNATDVA

SEQ ID NO: 90755 - protein, 9 aa, synthetic construct
  source 1..9: note = Seed: VVVGAGDVG (KRAS G13D)
LVVNATDVD

SEQ ID NO: 90756 - protein, 9 aa, synthetic construct
  source 1..9: note = Seed: VVVGAGDVG (KRAS G13D)
LVVNATDVE

SEQ ID NO: 90757 - protein, 9 aa, synthetic construct
  source 1..9: note = Seed: VVVGAGDVG (KRAS G13D)
LVVNATDVG

SEQ ID NO: 90758 - protein, 9 aa, synthetic construct
  source 1..9: note = Seed: VVVGAGDVG (KRAS G13D)
LVVNATDVH

SEQ ID NO: 90759 - protein, 9 aa, synthetic construct
  source 1..9: note = Seed: VVVGAGDVG (KRAS G13D)
LVVNATDVI

SEQ ID NO: 90760 - protein, 9 aa, synthetic construct
  source 1..9: note = Seed: VVVGAGDVG (KRAS G13D)
LVVNATDVL

SEQ ID NO: 90761 - protein, 9 aa, synthetic construct
  source 1..9: note = Seed: VVVGAGDVG (KRAS G13D)
LVVNATDVM

SEQ ID NO: 90762 - protein, 9 aa, synthetic construct
  source 1..9: note = Seed: VVVGAGDVG (KRAS G13D)
LVVNATDVN

SEQ ID NO: 90763 - protein, 9 aa, synthetic construct
  source 1..9: note = Seed: VVVGAGDVG (KRAS G13D)
LVVNATDVQ

SEQ ID NO: 90764 - protein, 9 aa, synthetic construct
  source 1..9: note = Seed: VVVGAGDVG (KRAS G13D)
LVVNATDVS

SEQ ID NO: 90765 - protein, 9 aa, synthetic construct
  source 1..9: note = Seed: VVVGAGDVG (KRAS G13D)
LVVNATDVT

SEQ ID NO: 90766 - protein, 9 aa, synthetic construct
  source 1..9: note = Seed: VVVGAGDVG (KRAS G13D)
LVVNATDVV

SEQ ID NO: 90767 - protein, 9 aa, synthetic construct
  source 1..9: note = Seed: VVVGAGDVG (KRAS G13D)
LVVNAVDVA

SEQ ID NO: 90768 - protein, 9 aa, synthetic construct
  source 1..9: note = Seed: VVVGAGDVG (KRAS G13D)
LVVNAVDVD

SEQ ID NO: 90769 - protein, 9 aa, synthetic construct
  source 1..9: note = Seed: VVVGAGDVG (KRAS G13D)
LVVNAVDVG

SEQ ID NO: 90770 - protein, 9 aa, synthetic construct
  source 1..9: note = Seed: VVVGAGDVG (KRAS G13D)
LVVNAVDVI

SEQ ID NO: 90771 - protein, 9 aa, synthetic construct
  source 1..9: note = Seed: VVVGAGDVG (KRAS G13D)
LVVNAVDVL

SEQ ID NO: 90772 - protein, 9 aa, synthetic construct
  source 1..9: note = Seed: VVVGAGDVG (KRAS G13D)
LVVNAVDVM

SEQ ID NO: 90773 - protein, 9 aa, synthetic construct
  source 1..9: note = Seed: VVVGAGDVG (KRAS G13D)
LVVNAVDVN

SEQ ID NO: 90774 - protein, 9 aa, synthetic construct
  source 1..9: note = Seed: VVVGAGDVG (KRAS G13D)
LVVNAVDVQ

SEQ ID NO: 90775 - protein, 9 aa, synthetic construct
  source 1..9: note = Seed: VVVGAGDVG (KRAS G13D)
LVVNAVDVS

SEQ ID NO: 90776 - protein, 9 aa, synthetic construct
  source 1..9: note = Seed: VVVGAGDVG (KRAS G13D)
LVVNAVDVT

SEQ ID NO: 90777 - protein, 9 aa, synthetic construct
  source 1..9: note = Seed: VVVGAGDVG (KRAS G13D)
LVVNAVDVV

SEQ ID NO: 90778 - protein, 9 aa, synthetic construct
  source 1..9: note = Seed: VVVGAGDVG (KRAS G13D)
LVVQAADVA

SEQ ID NO: 90779 - protein, 9 aa, synthetic construct
  source 1..9: note = Seed: VVVGAGDVG (KRAS G13D)
LVVQAADVC

SEQ ID NO: 90780 - protein, 9 aa, synthetic construct
  source 1..9: note = Seed: VVVGAGDVG (KRAS G13D)
LVVQAADVD

SEQ ID NO: 90781 - protein, 9 aa, synthetic construct
  source 1..9: note = Seed: VVVGAGDVG (KRAS G13D)
LVVQAADVE

SEQ ID NO: 90782 - protein, 9 aa, synthetic construct
  source 1..9: note = Seed: VVVGAGDVG (KRAS G13D)
LVVQAADVG

SEQ ID NO: 90783 - protein, 9 aa, synthetic construct
  source 1..9: note = Seed: VVVGAGDVG (KRAS G13D)
LVVQAADVH

SEQ ID NO: 90784 - protein, 9 aa, synthetic construct
  source 1..9: note = Seed: VVVGAGDVG (KRAS G13D)
LVVQAADVI

SEQ ID NO: 90785 - protein, 9 aa, synthetic construct
  source 1..9: note = Seed: VVVGAGDVG (KRAS G13D)
LVVQAADVL

SEQ ID NO: 90786 - protein, 9 aa, synthetic construct
  source 1..9: note = Seed: VVVGAGDVG (KRAS G13D)
LVVQAADVM

SEQ ID NO: 90787 - protein, 9 aa, synthetic construct
  source 1..9: note = Seed: VVVGAGDVG (KRAS G13D)
LVVQAADVN

SEQ ID NO: 90788 - protein, 9 aa, synthetic construct
  source 1..9: note = Seed: VVVGAGDVG (KRAS G13D)
LVVQAADVQ

SEQ ID NO: 90789 - protein, 9 aa, synthetic construct
  source 1..9: note = Seed: VVVGAGDVG (KRAS G13D)
LVVQAADVS

SEQ ID NO: 90790 - protein, 9 aa, synthetic construct
  source 1..9: note = Seed: VVVGAGDVG (KRAS G13D)
LVVQAADVT

SEQ ID NO: 90791 - protein, 9 aa, synthetic construct
  source 1..9: note = Seed: VVVGAGDVG (KRAS G13D)
LVVQAADVV

SEQ ID NO: 90792 - protein, 9 aa, synthetic construct
  source 1..9: note = Seed: VVVGAGDVG (KRAS G13D)
LVVQAADVY

SEQ ID NO: 90793 - protein, 9 aa, synthetic construct
  source 1..9: note = Seed: VVVGAGDVG (KRAS G13D)
LVVQADDVA

SEQ ID NO: 90794 - protein, 9 aa, synthetic construct
  source 1..9: note = Seed: VVVGAGDVG (KRAS G13D)
LVVQADDVN

SEQ ID NO: 90795 - protein, 9 aa, synthetic construct
  source 1..9: note = Seed: VVVGAGDVG (KRAS G13D)
LVVQADDVQ

SEQ ID NO: 90796 - protein, 9 aa, synthetic construct
  source 1..9: note = Seed: VVVGAGDVG (KRAS G13D)
LVVQADDVS

SEQ ID NO: 90797 - protein, 9 aa, synthetic construct
  source 1..9: note = Seed: VVVGAGDVG (KRAS G13D)
LVVQADDVV

SEQ ID NO: 90798 - protein, 9 aa, synthetic construct
  source 1..9: note = Seed: VVVGAGDVG (KRAS G13D)
LVVQAEDVG

SEQ ID NO: 90799 - protein, 9 aa, synthetic construct
  source 1..9: note = Seed: VVVGAGDVG (KRAS G13D)
LVVQAEDVS

SEQ ID NO: 90800 - protein, 9 aa, synthetic construct
  source 1..9: note = Seed: VVVGAGDVG (KRAS G13D)
LVVQAGDVA

SEQ ID NO: 90801 - protein, 9 aa, synthetic construct
  source 1..9: note = Seed: VVVGAGDVG (KRAS G13D)
LVVQAGDVG

SEQ ID NO: 90802 - protein, 9 aa, synthetic construct
  source 1..9: note = Seed: VVVGAGDVG (KRAS G13D)
LVVQAGDVH

SEQ ID NO: 90803 - protein, 9 aa, synthetic construct
  source 1..9: note = Seed: VVVGAGDVG (KRAS G13D)
LVVQAGDVI

SEQ ID NO: 90804 - protein, 9 aa, synthetic construct
  source 1..9: note = Seed: VVVGAGDVG (KRAS G13D)
LVVQAGDVL

SEQ ID NO: 90805 - protein, 9 aa, synthetic construct
  source 1..9: note = Seed: VVVGAGDVG (KRAS G13D)
LVVQAGDVM

SEQ ID NO: 90806 - protein, 9 aa, synthetic construct
  source 1..9: note = Seed: VVVGAGDVG (KRAS G13D)
LVVQAGDVN

SEQ ID NO: 90807 - protein, 9 aa, synthetic construct
  source 1..9: note = Seed: VVVGAGDVG (KRAS G13D)
LVVQAGDVQ

SEQ ID NO: 90808 - protein, 9 aa, synthetic construct
  source 1..9: note = Seed: VVVGAGDVG (KRAS G13D)
LVVQAGDVS

SEQ ID NO: 90809 - protein, 9 aa, synthetic construct
  source 1..9: note = Seed: VVVGAGDVG (KRAS G13D)
LVVQAGDVT

SEQ ID NO: 90810 - protein, 9 aa, synthetic construct
  source 1..9: note = Seed: VVVGAGDVG (KRAS G13D)
LVVQAGDVV

SEQ ID NO: 90811 - protein, 9 aa, synthetic construct
  source 1..9: note = Seed: VVVGAGDVG (KRAS G13D)
LVVQAGDVY

SEQ ID NO: 90812 - protein, 9 aa, synthetic construct
  source 1..9: note = Seed: VVVGAGDVG (KRAS G13D)
LVVQAIDVA

SEQ ID NO: 90813 - protein, 9 aa, synthetic construct
  source 1..9: note = Seed: VVVGAGDVG (KRAS G13D)
LVVQAIDVD

SEQ ID NO: 90814 - protein, 9 aa, synthetic construct
  source 1..9: note = Seed: VVVGAGDVG (KRAS G13D)
LVVQAIDVG

SEQ ID NO: 90815 - protein, 9 aa, synthetic construct
  source 1..9: note = Seed: VVVGAGDVG (KRAS G13D)
LVVQAIDVH

SEQ ID NO: 90816 - protein, 9 aa, synthetic construct
  source 1..9: note = Seed: VVVGAGDVG (KRAS G13D)
LVVQAIDVI

SEQ ID NO: 90817 - protein, 9 aa, synthetic construct
  source 1..9: note = Seed: VVVGAGDVG (KRAS G13D)
LVVQAIDVM

SEQ ID NO: 90818 - protein, 9 aa, synthetic construct
  source 1..9: note = Seed: VVVGAGDVG (KRAS G13D)
LVVQAIDVN

SEQ ID NO: 90819 - protein, 9 aa, synthetic construct
  source 1..9: note = Seed: VVVGAGDVG (KRAS G13D)
LVVQAIDVQ

SEQ ID NO: 90820 - protein, 9 aa, synthetic construct
  source 1..9: note = Seed: VVVGAGDVG (KRAS G13D)
LVVQAIDVS

SEQ ID NO: 90821 - protein, 9 aa, synthetic construct
  source 1..9: note = Seed: VVVGAGDVG (KRAS G13D)
LVVQAIDVT

SEQ ID NO: 90822 - protein, 9 aa, synthetic construct
  source 1..9: note = Seed: VVVGAGDVG (KRAS G13D)
LVVQAIDVV

SEQ ID NO: 90823 - protein, 9 aa, synthetic construct
  source 1..9: note = Seed: VVVGAGDVG (KRAS G13D)
LVVQAIDVY

SEQ ID NO: 90824 - protein, 9 aa, synthetic construct
  source 1..9: note = Seed: VVVGAGDVG (KRAS G13D)
LVVQALDVA

SEQ ID NO: 90825 - protein, 9 aa, synthetic construct
  source 1..9: note = Seed: VVVGAGDVG (KRAS G13D)
LVVQALDVC

SEQ ID NO: 90826 - protein, 9 aa, synthetic construct
  source 1..9: note = Seed: VVVGAGDVG (KRAS G13D)
LVVQALDVG

SEQ ID NO: 90827 - protein, 9 aa, synthetic construct
  source 1..9: note = Seed: VVVGAGDVG (KRAS G13D)
LVVQALDVI

SEQ ID NO: 90828 - protein, 9 aa, synthetic construct
  source 1..9: note = Seed: VVVGAGDVG (KRAS G13D)
LVVQALDVL

SEQ ID NO: 90829 - protein, 9 aa, synthetic construct
  source 1..9: note = Seed: VVVGAGDVG (KRAS G13D)
LVVQALDVM

SEQ ID NO: 90830 - protein, 9 aa, synthetic construct
  source 1..9: note = Seed: VVVGAGDVG (KRAS G13D)
LVVQALDVS

SEQ ID NO: 90831 - protein, 9 aa, synthetic construct
  source 1..9: note = Seed: VVVGAGDVG (KRAS G13D)
LVVQALDVV

SEQ ID NO: 90832 - protein, 9 aa, synthetic construct
  source 1..9: note = Seed: VVVGAGDVG (KRAS G13D)
LVVQALDVY

SEQ ID NO: 90833 - protein, 9 aa, synthetic construct
  source 1..9: note = Seed: VVVGAGDVG (KRAS G13D)
LVVQANDVA

SEQ ID NO: 90834 - protein, 9 aa, synthetic construct
  source 1..9: note = Seed: VVVGAGDVG (KRAS G13D)
LVVQANDVC

SEQ ID NO: 90835 - protein, 9 aa, synthetic construct
  source 1..9: note = Seed: VVVGAGDVG (KRAS G13D)
LVVQANDVD

SEQ ID NO: 90836 - protein, 9 aa, synthetic construct
  source 1..9: note = Seed: VVVGAGDVG (KRAS G13D)
LVVQANDVG

SEQ ID NO: 90837 - protein, 9 aa, synthetic construct
  source 1..9: note = Seed: VVVGAGDVG (KRAS G13D)
LVVQANDVH

SEQ ID NO: 90838 - protein, 9 aa, synthetic construct
  source 1..9: note = Seed: VVVGAGDVG (KRAS G13D)
LVVQANDVI

SEQ ID NO: 90839 - protein, 9 aa, synthetic construct
  source 1..9: note = Seed: VVVGAGDVG (KRAS G13D)
LVVQANDVL

SEQ ID NO: 90840 - protein, 9 aa, synthetic construct
  source 1..9: note = Seed: VVVGAGDVG (KRAS G13D)
LVVQANDVM

SEQ ID NO: 90841 - protein, 9 aa, synthetic construct
  source 1..9: note = Seed: VVVGAGDVG (KRAS G13D)
LVVQANDVN

SEQ ID NO: 90842 - protein, 9 aa, synthetic construct
  source 1..9: note = Seed: VVVGAGDVG (KRAS G13D)
LVVQANDVQ

SEQ ID NO: 90843 - protein, 9 aa, synthetic construct
  source 1..9: note = Seed: VVVGAGDVG (KRAS G13D)
LVVQANDVS

SEQ ID NO: 90844 - protein, 9 aa, synthetic construct
  source 1..9: note = Seed: VVVGAGDVG (KRAS G13D)
LVVQANDVT

SEQ ID NO: 90845 - protein, 9 aa, synthetic construct
  source 1..9: note = Seed: VVVGAGDVG (KRAS G13D)
LVVQANDVV

SEQ ID NO: 90846 - protein, 9 aa, synthetic construct
  source 1..9: note = Seed: VVVGAGDVG (KRAS G13D)
LVVQANDVY

SEQ ID NO: 90847 - protein, 9 aa, synthetic construct
  source 1..9: note = Seed: VVVGAGDVG (KRAS G13D)
LVVQAPDVA

SEQ ID NO: 90848 - protein, 9 aa, synthetic construct
  source 1..9: note = Seed: VVVGAGDVG (KRAS G13D)
LVVQAPDVG

SEQ ID NO: 90849 - protein, 9 aa, synthetic construct
  source 1..9: note = Seed: VVVGAGDVG (KRAS G13D)
LVVQAPDVH

SEQ ID NO: 90850 - protein, 9 aa, synthetic construct
  source 1..9: note = Seed: VVVGAGDVG (KRAS G13D)
LVVQAPDVI

SEQ ID NO: 90851 - protein, 9 aa, synthetic construct
  source 1..9: note = Seed: VVVGAGDVG (KRAS G13D)
LVVQAPDVL

SEQ ID NO: 90852 - protein, 9 aa, synthetic construct
  source 1..9: note = Seed: VVVGAGDVG (KRAS G13D)
LVVQAPDVM

SEQ ID NO: 90853 - protein, 9 aa, synthetic construct
  source 1..9: note = Seed: VVVGAGDVG (KRAS G13D)
LVVQAPDVN

SEQ ID NO: 90854 - protein, 9 aa, synthetic construct
  source 1..9: note = Seed: VVVGAGDVG (KRAS G13D)
LVVQAPDVQ

SEQ ID NO: 90855 - protein, 9 aa, synthetic construct
  source 1..9: note = Seed: VVVGAGDVG (KRAS G13D)
LVVQAPDVS

SEQ ID NO: 90856 - protein, 9 aa, synthetic construct
  source 1..9: note = Seed: VVVGAGDVG (KRAS G13D)
LVVQAPDVT

SEQ ID NO: 90857 - protein, 9 aa, synthetic construct
  source 1..9: note = Seed: VVVGAGDVG (KRAS G13D)
LVVQAPDVV

SEQ ID NO: 90858 - protein, 9 aa, synthetic construct
  source 1..9: note = Seed: VVVGAGDVG (KRAS G13D)
LVVQAPDVY

SEQ ID NO: 90859 - protein, 9 aa, synthetic construct
  source 1..9: note = Seed: VVVGAGDVG (KRAS G13D)
LVVQASDVA

SEQ ID NO: 90860 - protein, 9 aa, synthetic construct
  source 1..9: note = Seed: VVVGAGDVG (KRAS G13D)
LVVQASDVC

SEQ ID NO: 90861 - protein, 9 aa, synthetic construct
  source 1..9: note = Seed: VVVGAGDVG (KRAS G13D)
LVVQASDVD

SEQ ID NO: 90862 - protein, 9 aa, synthetic construct
  source 1..9: note = Seed: VVVGAGDVG (KRAS G13D)
LVVQASDVE

SEQ ID NO: 90863 - protein, 9 aa, synthetic construct
  source 1..9: note = Seed: VVVGAGDVG (KRAS G13D)
LVVQASDVG

SEQ ID NO: 90864 - protein, 9 aa, synthetic construct
  source 1..9: note = Seed: VVVGAGDVG (KRAS G13D)
LVVQASDVH

SEQ ID NO: 90865 - protein, 9 aa, synthetic construct
  source 1..9: note = Seed: VVVGAGDVG (KRAS G13D)
LVVQASDVI

SEQ ID NO: 90866 - protein, 9 aa, synthetic construct
  source 1..9: note = Seed: VVVGAGDVG (KRAS G13D)
LVVQASDVL

SEQ ID NO: 90867 - protein, 9 aa, synthetic construct
  source 1..9: note = Seed: VVVGAGDVG (KRAS G13D)
LVVQASDVM

SEQ ID NO: 90868 - protein, 9 aa, synthetic construct
  source 1..9: note = Seed: VVVGAGDVG (KRAS G13D)
LVVQASDVN

SEQ ID NO: 90869 - protein, 9 aa, synthetic construct
  source 1..9: note = Seed: VVVGAGDVG (KRAS G13D)
LVVQASDVQ

SEQ ID NO: 90870 - protein, 9 aa, synthetic construct
  source 1..9: note = Seed: VVVGAGDVG (KRAS G13D)
LVVQASDVS

SEQ ID NO: 90871 - protein, 9 aa, synthetic construct
  source 1..9: note = Seed: VVVGAGDVG (KRAS G13D)
LVVQASDVT

SEQ ID NO: 90872 - protein, 9 aa, synthetic construct
  source 1..9: note = Seed: VVVGAGDVG (KRAS G13D)
LVVQASDVV

SEQ ID NO: 90873 - protein, 9 aa, synthetic construct
  source 1..9: note = Seed: VVVGAGDVG (KRAS G13D)
LVVQASDVY

SEQ ID NO: 90874 - protein, 9 aa, synthetic construct
  source 1..9: note = Seed: VVVGAGDVG (KRAS G13D)
LVVQATDVA

SEQ ID NO: 90875 - protein, 9 aa, synthetic construct
  source 1..9: note = Seed: VVVGAGDVG (KRAS G13D)
LVVQATDVD

SEQ ID NO: 90876 - protein, 9 aa, synthetic construct
  source 1..9: note = Seed: VVVGAGDVG (KRAS G13D)
LVVQATDVE

SEQ ID NO: 90877 - protein, 9 aa, synthetic construct
  source 1..9: note = Seed: VVVGAGDVG (KRAS G13D)
LVVQATDVF

SEQ ID NO: 90878 - protein, 9 aa, synthetic construct
  source 1..9: note = Seed: VVVGAGDVG (KRAS G13D)
LVVQATDVG

SEQ ID NO: 90879 - protein, 9 aa, synthetic construct
  source 1..9: note = Seed: VVVGAGDVG (KRAS G13D)
LVVQATDVH

SEQ ID NO: 90880 - protein, 9 aa, synthetic construct
  source 1..9: note = Seed: VVVGAGDVG (KRAS G13D)
LVVQATDVI

SEQ ID NO: 90881 - protein, 9 aa, synthetic construct
  source 1..9: note = Seed: VVVGAGDVG (KRAS G13D)
LVVQATDVK

SEQ ID NO: 90882 - protein, 9 aa, synthetic construct
  source 1..9: note = Seed: VVVGAGDVG (KRAS G13D)
LVVQATDVL

SEQ ID NO: 90883 - protein, 9 aa, synthetic construct
  source 1..9: note = Seed: VVVGAGDVG (KRAS G13D)
LVVQATDVM

SEQ ID NO: 90884 - protein, 9 aa, synthetic construct
  source 1..9: note = Seed: VVVGAGDVG (KRAS G13D)
LVVQATDVN

SEQ ID NO: 90885 - protein, 9 aa, synthetic construct
  source 1..9: note = Seed: VVVGAGDVG (KRAS G13D)
LVVQATDVP

SEQ ID NO: 90886 - protein, 9 aa, synthetic construct
  source 1..9: note = Seed: VVVGAGDVG (KRAS G13D)
LVVQATDVQ

SEQ ID NO: 90887 - protein, 9 aa, synthetic construct
  source 1..9: note = Seed: VVVGAGDVG (KRAS G13D)
LVVQATDVR

SEQ ID NO: 90888 - protein, 9 aa, synthetic construct
  source 1..9: note = Seed: VVVGAGDVG (KRAS G13D)
LVVQATDVS

SEQ ID NO: 90889 - protein, 9 aa, synthetic construct
  source 1..9: note = Seed: VVVGAGDVG (KRAS G13D)
LVVQATDVT

SEQ ID NO: 90890 - protein, 9 aa, synthetic construct
  source 1..9: note = Seed: VVVGAGDVG (KRAS G13D)
LVVQATDVV

SEQ ID NO: 90891 - protein, 9 aa, synthetic construct
  source 1..9: note = Seed: VVVGAGDVG (KRAS G13D)
LVVQATDVY

SEQ ID NO: 90892 - protein, 9 aa, synthetic construct
  source 1..9: note = Seed: VVVGAGDVG (KRAS G13D)
LVVQAVDVA

SEQ ID NO: 90893 - protein, 9 aa, synthetic construct
  source 1..9: note = Seed: VVVGAGDVG (KRAS G13D)
LVVQAVDVD

SEQ ID NO: 90894 - protein, 9 aa, synthetic construct
  source 1..9: note = Seed: VVVGAGDVG (KRAS G13D)
LVVQAVDVE

SEQ ID NO: 90895 - protein, 9 aa, synthetic construct
  source 1..9: note = Seed: VVVGAGDVG (KRAS G13D)
LVVQAVDVG

SEQ ID NO: 90896 - protein, 9 aa, synthetic construct
  source 1..9: note = Seed: VVVGAGDVG (KRAS G13D)
LVVQAVDVH

SEQ ID NO: 90897 - protein, 9 aa, synthetic construct
  source 1..9: note = Seed: VVVGAGDVG (KRAS G13D)
LVVQAVDVI

SEQ ID NO: 90898 - protein, 9 aa, synthetic construct
  source 1..9: note = Seed: VVVGAGDVG (KRAS G13D)
LVVQAVDVL

SEQ ID NO: 90899 - protein, 9 aa, synthetic construct
  source 1..9: note = Seed: VVVGAGDVG (KRAS G13D)
LVVQAVDVM

SEQ ID NO: 90900 - protein, 9 aa, synthetic construct
  source 1..9: note = Seed: VVVGAGDVG (KRAS G13D)
LVVQAVDVN

SEQ ID NO: 90901 - protein, 9 aa, synthetic construct
  source 1..9: note = Seed: VVVGAGDVG (KRAS G13D)
LVVQAVDVP

SEQ ID NO: 90902 - protein, 9 aa, synthetic construct
  source 1..9: note = Seed: VVVGAGDVG (KRAS G13D)
LVVQAVDVQ

SEQ ID NO: 90903 - protein, 9 aa, synthetic construct
  source 1..9: note = Seed: VVVGAGDVG (KRAS G13D)
LVVQAVDVS

SEQ ID NO: 90904 - protein, 9 aa, synthetic construct
  source 1..9: note = Seed: VVVGAGDVG (KRAS G13D)
LVVQAVDVT

SEQ ID NO: 90905 - protein, 9 aa, synthetic construct
  source 1..9: note = Seed: VVVGAGDVG (KRAS G13D)
LVVQAVDVV

SEQ ID NO: 90906 - protein, 9 aa, synthetic construct
  source 1..9: note = Seed: VVVGAGDVG (KRAS G13D)
LVVQAVDVY

SEQ ID NO: 90907 - protein, 9 aa, synthetic construct
  source 1..9: note = Seed: VVVGAGDVG (KRAS G13D)
LVVRANDVA

SEQ ID NO: 90908 - protein, 9 aa, synthetic construct
  source 1..9: note = Seed: VVVGAGDVG (KRAS G13D)
LVVSAADVA

SEQ ID NO: 90909 - protein, 9 aa, synthetic construct
  source 1..9: note = Seed: VVVGAGDVG (KRAS G13D)
LVVSAADVC

SEQ ID NO: 90910 - protein, 9 aa, synthetic construct
  source 1..9: note = Seed: VVVGAGDVG (KRAS G13D)
LVVSAADVD

SEQ ID NO: 90911 - protein, 9 aa, synthetic construct
  source 1..9: note = Seed: VVVGAGDVG (KRAS G13D)
LVVSAADVE

SEQ ID NO: 90912 - protein, 9 aa, synthetic construct
  source 1..9: note = Seed: VVVGAGDVG (KRAS G13D)
LVVSAADVG

SEQ ID NO: 90913 - protein, 9 aa, synthetic construct
  source 1..9: note = Seed: VVVGAGDVG (KRAS G13D)
LVVSAADVH

SEQ ID NO: 90914 - protein, 9 aa, synthetic construct
  source 1..9: note = Seed: VVVGAGDVG (KRAS G13D)
LVVSAADVI

SEQ ID NO: 90915 - protein, 9 aa, synthetic construct
  source 1..9: note = Seed: VVVGAGDVG (KRAS G13D)
LVVSAADVL

SEQ ID NO: 90916 - protein, 9 aa, synthetic construct
  source 1..9: note = Seed: VVVGAGDVG (KRAS G13D)
LVVSAADVM

SEQ ID NO: 90917 - protein, 9 aa, synthetic construct
  source 1..9: note = Seed: VVVGAGDVG (KRAS G13D)
LVVSAADVN

SEQ ID NO: 90918 - protein, 9 aa, synthetic construct
  source 1..9: note = Seed: VVVGAGDVG (KRAS G13D)
LVVSAADVQ

SEQ ID NO: 90919 - protein, 9 aa, synthetic construct
  source 1..9: note = Seed: VVVGAGDVG (KRAS G13D)
LVVSAADVS

SEQ ID NO: 90920 - protein, 9 aa, synthetic construct
  source 1..9: note = Seed: VVVGAGDVG (KRAS G13D)
LVVSAADVT

SEQ ID NO: 90921 - protein, 9 aa, synthetic construct
  source 1..9: note = Seed: VVVGAGDVG (KRAS G13D)
LVVSAADVV

SEQ ID NO: 90922 - protein, 9 aa, synthetic construct
  source 1..9: note = Seed: VVVGAGDVG (KRAS G13D)
LVVSADDVA

SEQ ID NO: 90923 - protein, 9 aa, synthetic construct
  source 1..9: note = Seed: VVVGAGDVG (KRAS G13D)
LVVSADDVI

SEQ ID NO: 90924 - protein, 9 aa, synthetic construct
  source 1..9: note = Seed: VVVGAGDVG (KRAS G13D)
LVVSADDVL

SEQ ID NO: 90925 - protein, 9 aa, synthetic construct
  source 1..9: note = Seed: VVVGAGDVG (KRAS G13D)
LVVSADDVM

SEQ ID NO: 90926 - protein, 9 aa, synthetic construct
  source 1..9: note = Seed: VVVGAGDVG (KRAS G13D)
LVVSADDVS

SEQ ID NO: 90927 - protein, 9 aa, synthetic construct
  source 1..9: note = Seed: VVVGAGDVG (KRAS G13D)
LVVSADDVV

SEQ ID NO: 90928 - protein, 9 aa, synthetic construct
  source 1..9: note = Seed: VVVGAGDVG (KRAS G13D)
LVVSAGDVA

SEQ ID NO: 90929 - protein, 9 aa, synthetic construct
  source 1..9: note = Seed: VVVGAGDVG (KRAS G13D)
LVVSAGDVG

SEQ ID NO: 90930 - protein, 9 aa, synthetic construct
  source 1..9: note = Seed: VVVGAGDVG (KRAS G13D)
LVVSAGDVH

SEQ ID NO: 90931 - protein, 9 aa, synthetic construct
  source 1..9: note = Seed: VVVGAGDVG (KRAS G13D)
LVVSAGDVI

SEQ ID NO: 90932 - protein, 9 aa, synthetic construct
  source 1..9: note = Seed: VVVGAGDVG (KRAS G13D)
LVVSAGDVL

SEQ ID NO: 90933 - protein, 9 aa, synthetic construct
  source 1..9: note = Seed: VVVGAGDVG (KRAS G13D)
LVVSAGDVM

SEQ ID NO: 90934 - protein, 9 aa, synthetic construct
  source 1..9: note = Seed: VVVGAGDVG (KRAS G13D)
LVVSAGDVN

SEQ ID NO: 90935 - protein, 9 aa, synthetic construct
  source 1..9: note = Seed: VVVGAGDVG (KRAS G13D)
LVVSAGDVQ

SEQ ID NO: 90936 - protein, 9 aa, synthetic construct
  source 1..9: note = Seed: VVVGAGDVG (KRAS G13D)
LVVSAGDVS

SEQ ID NO: 90937 - protein, 9 aa, synthetic construct
  source 1..9: note = Seed: VVVGAGDVG (KRAS G13D)
LVVSAGDVT

SEQ ID NO: 90938 - protein, 9 aa, synthetic construct
  source 1..9: note = Seed: VVVGAGDVG (KRAS G13D)
LVVSAGDVV

SEQ ID NO: 90939 - protein, 9 aa, synthetic construct
  source 1..9: note = Seed: VVVGAGDVG (KRAS G13D)
LVVSAIDVA

SEQ ID NO: 90940 - protein, 9 aa, synthetic construct
  source 1..9: note = Seed: VVVGAGDVG (KRAS G13D)
LVVSAIDVE

SEQ ID NO: 90941 - protein, 9 aa, synthetic construct
  source 1..9: note = Seed: VVVGAGDVG (KRAS G13D)
LVVSAIDVF

SEQ ID NO: 90942 - protein, 9 aa, synthetic construct
  source 1..9: note = Seed: VVVGAGDVG (KRAS G13D)
LVVSAIDVG

SEQ ID NO: 90943 - protein, 9 aa, synthetic construct
  source 1..9: note = Seed: VVVGAGDVG (KRAS G13D)
LVVSAIDVI

SEQ ID NO: 90944 - protein, 9 aa, synthetic construct
  source 1..9: note = Seed: VVVGAGDVG (KRAS G13D)
LVVSAIDVL

SEQ ID NO: 90945 - protein, 9 aa, synthetic construct
  source 1..9: note = Seed: VVVGAGDVG (KRAS G13D)
LVVSAIDVM

SEQ ID NO: 90946 - protein, 9 aa, synthetic construct
  source 1..9: note = Seed: VVVGAGDVG (KRAS G13D)
LVVSAIDVN

SEQ ID NO: 90947 - protein, 9 aa, synthetic construct
  source 1..9: note = Seed: VVVGAGDVG (KRAS G13D)
LVVSAIDVQ

SEQ ID NO: 90948 - protein, 9 aa, synthetic construct
  source 1..9: note = Seed: VVVGAGDVG (KRAS G13D)
LVVSAIDVS

SEQ ID NO: 90949 - protein, 9 aa, synthetic construct
  source 1..9: note = Seed: VVVGAGDVG (KRAS G13D)
LVVSAIDVT

SEQ ID NO: 90950 - protein, 9 aa, synthetic construct
  source 1..9: note = Seed: VVVGAGDVG (KRAS G13D)
LVVSAIDVV

SEQ ID NO: 90951 - protein, 9 aa, synthetic construct
  source 1..9: note = Seed: VVVGAGDVG (KRAS G13D)
LVVSAIDVY

SEQ ID NO: 90952 - protein, 9 aa, synthetic construct
  source 1..9: note = Seed: VVVGAGDVG (KRAS G13D)
LVVSALDVA

SEQ ID NO: 90953 - protein, 9 aa, synthetic construct
  source 1..9: note = Seed: VVVGAGDVG (KRAS G13D)
LVVSALDVF

SEQ ID NO: 90954 - protein, 9 aa, synthetic construct
  source 1..9: note = Seed: VVVGAGDVG (KRAS G13D)
LVVSALDVG

SEQ ID NO: 90955 - protein, 9 aa, synthetic construct
  source 1..9: note = Seed: VVVGAGDVG (KRAS G13D)
LVVSALDVI

SEQ ID NO: 90956 - protein, 9 aa, synthetic construct
  source 1..9: note = Seed: VVVGAGDVG (KRAS G13D)
LVVSALDVL

SEQ ID NO: 90957 - protein, 9 aa, synthetic construct
  source 1..9: note = Seed: VVVGAGDVG (KRAS G13D)
LVVSALDVM

SEQ ID NO: 90958 - protein, 9 aa, synthetic construct
  source 1..9: note = Seed: VVVGAGDVG (KRAS G13D)
LVVSALDVQ

SEQ ID NO: 90959 - protein, 9 aa, synthetic construct
  source 1..9: note = Seed: VVVGAGDVG (KRAS G13D)
LVVSALDVS

SEQ ID NO: 90960 - protein, 9 aa, synthetic construct
  source 1..9: note = Seed: VVVGAGDVG (KRAS G13D)
LVVSALDVV

SEQ ID NO: 90961 - protein, 9 aa, synthetic construct
  source 1..9: note = Seed: VVVGAGDVG (KRAS G13D)
LVVSALDVY

SEQ ID NO: 90962 - protein, 9 aa, synthetic construct
  source 1..9: note = Seed: VVVGAGDVG (KRAS G13D)
LVVSAMDVA

SEQ ID NO: 90963 - protein, 9 aa, synthetic construct
  source 1..9: note = Seed: VVVGAGDVG (KRAS G13D)
LVVSAMDVI

SEQ ID NO: 90964 - protein, 9 aa, synthetic construct
  source 1..9: note = Seed: VVVGAGDVG (KRAS G13D)
LVVSAMDVL

SEQ ID NO: 90965 - protein, 9 aa, synthetic construct
  source 1..9: note = Seed: VVVGAGDVG (KRAS G13D)
LVVSAMDVM

SEQ ID NO: 90966 - protein, 9 aa, synthetic construct
  source 1..9: note = Seed: VVVGAGDVG (KRAS G13D)
LVVSAMDVS

SEQ ID NO: 90967 - protein, 9 aa, synthetic construct
  source 1..9: note = Seed: VVVGAGDVG (KRAS G13D)
LVVSAMDVV

SEQ ID NO: 90968 - protein, 9 aa, synthetic construct
  source 1..9: note = Seed: VVVGAGDVG (KRAS G13D)
LVVSANDVA

SEQ ID NO: 90969 - protein, 9 aa, synthetic construct
  source 1..9: note = Seed: VVVGAGDVG (KRAS G13D)
LVVSANDVC

SEQ ID NO: 90970 - protein, 9 aa, synthetic construct
  source 1..9: note = Seed: VVVGAGDVG (KRAS G13D)
LVVSANDVG

SEQ ID NO: 90971 - protein, 9 aa, synthetic construct
  source 1..9: note = Seed: VVVGAGDVG (KRAS G13D)
LVVSANDVH

SEQ ID NO: 90972 - protein, 9 aa, synthetic construct
  source 1..9: note = Seed: VVVGAGDVG (KRAS G13D)
LVVSANDVI

SEQ ID NO: 90973 - protein, 9 aa, synthetic construct
  source 1..9: note = Seed: VVVGAGDVG (KRAS G13D)
LVVSANDVL

SEQ ID NO: 90974 - protein, 9 aa, synthetic construct
  source 1..9: note = Seed: VVVGAGDVG (KRAS G13D)
LVVSANDVM

SEQ ID NO: 90975 - protein, 9 aa, synthetic construct
  source 1..9: note = Seed: VVVGAGDVG (KRAS G13D)
LVVSANDVN

SEQ ID NO: 90976 - protein, 9 aa, synthetic construct
  source 1..9: note = Seed: VVVGAGDVG (KRAS G13D)
LVVSANDVQ

SEQ ID NO: 90977 - protein, 9 aa, synthetic construct
  source 1..9: note = Seed: VVVGAGDVG (KRAS G13D)
LVVSANDVS

SEQ ID NO: 90978 - protein, 9 aa, synthetic construct
  source 1..9: note = Seed: VVVGAGDVG (KRAS G13D)
LVVSANDVT

SEQ ID NO: 90979 - protein, 9 aa, synthetic construct
  source 1..9: note = Seed: VVVGAGDVG (KRAS G13D)
LVVSANDVV

SEQ ID NO: 90980 - protein, 9 aa, synthetic construct
  source 1..9: note = Seed: VVVGAGDVG (KRAS G13D)
LVVSANDVY

SEQ ID NO: 90981 - protein, 9 aa, synthetic construct
  source 1..9: note = Seed: VVVGAGDVG (KRAS G13D)
LVVSAPDVA

SEQ ID NO: 90982 - protein, 9 aa, synthetic construct
  source 1..9: note = Seed: VVVGAGDVG (KRAS G13D)
LVVSAPDVG

SEQ ID NO: 90983 - protein, 9 aa, synthetic construct
  source 1..9: note = Seed: VVVGAGDVG (KRAS G13D)
LVVSAPDVH

SEQ ID NO: 90984 - protein, 9 aa, synthetic construct
  source 1..9: note = Seed: VVVGAGDVG (KRAS G13D)
LVVSAPDVI

SEQ ID NO: 90985 - protein, 9 aa, synthetic construct
  source 1..9: note = Seed: VVVGAGDVG (KRAS G13D)
LVVSAPDVL

SEQ ID NO: 90986 - protein, 9 aa, synthetic construct
  source 1..9: note = Seed: VVVGAGDVG (KRAS G13D)
LVVSAPDVM

SEQ ID NO: 90987 - protein, 9 aa, synthetic construct
  source 1..9: note = Seed: VVVGAGDVG (KRAS G13D)
LVVSAPDVN

SEQ ID NO: 90988 - protein, 9 aa, synthetic construct
  source 1..9: note = Seed: VVVGAGDVG (KRAS G13D)
LVVSAPDVQ

SEQ ID NO: 90989 - protein, 9 aa, synthetic construct
  source 1..9: note = Seed: VVVGAGDVG (KRAS G13D)
LVVSAPDVS

SEQ ID NO: 90990 - protein, 9 aa, synthetic construct
  source 1..9: note = Seed: VVVGAGDVG (KRAS G13D)
LVVSAPDVT

SEQ ID NO: 90991 - protein, 9 aa, synthetic construct
  source 1..9: note = Seed: VVVGAGDVG (KRAS G13D)
LVVSAPDVV

SEQ ID NO: 90992 - protein, 9 aa, synthetic construct
  source 1..9: note = Seed: VVVGAGDVG (KRAS G13D)
LVVSASDVA

SEQ ID NO: 90993 - protein, 9 aa, synthetic construct
  source 1..9: note = Seed: VVVGAGDVG (KRAS G13D)
LVVSASDVC

SEQ ID NO: 90994 - protein, 9 aa, synthetic construct
  source 1..9: note = Seed: VVVGAGDVG (KRAS G13D)
LVVSASDVD

SEQ ID NO: 90995 - protein, 9 aa, synthetic construct
  source 1..9: note = Seed: VVVGAGDVG (KRAS G13D)
LVVSASDVG

SEQ ID NO: 90996 - protein, 9 aa, synthetic construct
  source 1..9: note = Seed: VVVGAGDVG (KRAS G13D)
LVVSASDVH

SEQ ID NO: 90997 - protein, 9 aa, synthetic construct
  source 1..9: note = Seed: VVVGAGDVG (KRAS G13D)
LVVSASDVI

SEQ ID NO: 90998 - protein, 9 aa, synthetic construct
  source 1..9: note = Seed: VVVGAGDVG (KRAS G13D)
LVVSASDVL

SEQ ID NO: 90999 - protein, 9 aa, synthetic construct
  source 1..9: note = Seed: VVVGAGDVG (KRAS G13D)
LVVSASDVM

SEQ ID NO: 91000 - protein, 9 aa, synthetic construct
  source 1..9: note = Seed: VVVGAGDVG (KRAS G13D)
LVVSASDVN

SEQ ID NO: 91001 - protein, 9 aa, synthetic construct
  source 1..9: note = Seed: VVVGAGDVG (KRAS G13D)
LVVSASDVQ

SEQ ID NO: 91002 - protein, 9 aa, synthetic construct
  source 1..9: note = Seed: VVVGAGDVG (KRAS G13D)
LVVSASDVS

SEQ ID NO: 91003 - protein, 9 aa, synthetic construct
  source 1..9: note = Seed: VVVGAGDVG (KRAS G13D)
LVVSASDVT

SEQ ID NO: 91004 - protein, 9 aa, synthetic construct
  source 1..9: note = Seed: VVVGAGDVG (KRAS G13D)
LVVSASDVV

SEQ ID NO: 91005 - protein, 9 aa, synthetic construct
  source 1..9: note = Seed: VVVGAGDVG (KRAS G13D)
LVVSASDVY

SEQ ID NO: 91006 - protein, 9 aa, synthetic construct
  source 1..9: note = Seed: VVVGAGDVG (KRAS G13D)
LVVSATDVA

SEQ ID NO: 91007 - protein, 9 aa, synthetic construct
  source 1..9: note = Seed: VVVGAGDVG (KRAS G13D)
LVVSATDVC

SEQ ID NO: 91008 - protein, 9 aa, synthetic construct
  source 1..9: note = Seed: VVVGAGDVG (KRAS G13D)
LVVSATDVD

SEQ ID NO: 91009 - protein, 9 aa, synthetic construct
  source 1..9: note = Seed: VVVGAGDVG (KRAS G13D)
LVVSATDVE

SEQ ID NO: 91010 - protein, 9 aa, synthetic construct
  source 1..9: note = Seed: VVVGAGDVG (KRAS G13D)
LVVSATDVG

SEQ ID NO: 91011 - protein, 9 aa, synthetic construct
  source 1..9: note = Seed: VVVGAGDVG (KRAS G13D)
LVVSATDVH

SEQ ID NO: 91012 - protein, 9 aa, synthetic construct
  source 1..9: note = Seed: VVVGAGDVG (KRAS G13D)
LVVSATDVI

SEQ ID NO: 91013 - protein, 9 aa, synthetic construct
  source 1..9: note = Seed: VVVGAGDVG (KRAS G13D)
LVVSATDVL

SEQ ID NO: 91014 - protein, 9 aa, synthetic construct
  source 1..9: note = Seed: VVVGAGDVG (KRAS G13D)
LVVSATDVM

SEQ ID NO: 91015 - protein, 9 aa, synthetic construct
  source 1..9: note = Seed: VVVGAGDVG (KRAS G13D)
LVVSATDVN

SEQ ID NO: 91016 - protein, 9 aa, synthetic construct
  source 1..9: note = Seed: VVVGAGDVG (KRAS G13D)
LVVSATDVQ

SEQ ID NO: 91017 - protein, 9 aa, synthetic construct
  source 1..9: note = Seed: VVVGAGDVG (KRAS G13D)
LVVSATDVS

SEQ ID NO: 91018 - protein, 9 aa, synthetic construct
  source 1..9: note = Seed: VVVGAGDVG (KRAS G13D)
LVVSATDVT

SEQ ID NO: 91019 - protein, 9 aa, synthetic construct
  source 1..9: note = Seed: VVVGAGDVG (KRAS G13D)
LVVSATDVV

SEQ ID NO: 91020 - protein, 9 aa, synthetic construct
  source 1..9: note = Seed: VVVGAGDVG (KRAS G13D)
LVVSAVDVA

SEQ ID NO: 91021 - protein, 9 aa, synthetic construct
  source 1..9: note = Seed: VVVGAGDVG (KRAS G13D)
LVVSAVDVD

SEQ ID NO: 91022 - protein, 9 aa, synthetic construct
  source 1..9: note = Seed: VVVGAGDVG (KRAS G13D)
LVVSAVDVG

SEQ ID NO: 91023 - protein, 9 aa, synthetic construct
  source 1..9: note = Seed: VVVGAGDVG (KRAS G13D)
LVVSAVDVH

SEQ ID NO: 91024 - protein, 9 aa, synthetic construct
  source 1..9: note = Seed: VVVGAGDVG (KRAS G13D)
LVVSAVDVI

SEQ ID NO: 91025 - protein, 9 aa, synthetic construct
  source 1..9: note = Seed: VVVGAGDVG (KRAS G13D)
LVVSAVDVL

SEQ ID NO: 91026 - protein, 9 aa, synthetic construct
  source 1..9: note = Seed: VVVGAGDVG (KRAS G13D)
LVVSAVDVM

SEQ ID NO: 91027 - protein, 9 aa, synthetic construct
  source 1..9: note = Seed: VVVGAGDVG (KRAS G13D)
LVVSAVDVN

SEQ ID NO: 91028 - protein, 9 aa, synthetic construct
  source 1..9: note = Seed: VVVGAGDVG (KRAS G13D)
LVVSAVDVQ

SEQ ID NO: 91029 - protein, 9 aa, synthetic construct
  source 1..9: note = Seed: VVVGAGDVG (KRAS G13D)
LVVSAVDVS

SEQ ID NO: 91030 - protein, 9 aa, synthetic construct
  source 1..9: note = Seed: VVVGAGDVG (KRAS G13D)
LVVSAVDVT

SEQ ID NO: 91031 - protein, 9 aa, synthetic construct
  source 1..9: note = Seed: VVVGAGDVG (KRAS G13D)
LVVSAVDVV

SEQ ID NO: 91032 - protein, 9 aa, synthetic construct
  source 1..9: note = Seed: VVVGAGDVG (KRAS G13D)
LVVSAVDVY

SEQ ID NO: 91033 - protein, 9 aa, synthetic construct
  source 1..9: note = Seed: VVVGAGDVG (KRAS G13D)
LVVTAADVA

SEQ ID NO: 91034 - protein, 9 aa, synthetic construct
  source 1..9: note = Seed: VVVGAGDVG (KRAS G13D)
LVVTAADVC

SEQ ID NO: 91035 - protein, 9 aa, synthetic construct
  source 1..9: note = Seed: VVVGAGDVG (KRAS G13D)
LVVTAADVD

SEQ ID NO: 91036 - protein, 9 aa, synthetic construct
  source 1..9: note = Seed: VVVGAGDVG (KRAS G13D)
LVVTAADVE

SEQ ID NO: 91037 - protein, 9 aa, synthetic construct
  source 1..9: note = Seed: VVVGAGDVG (KRAS G13D)
LVVTAADVG

SEQ ID NO: 91038 - protein, 9 aa, synthetic construct
  source 1..9: note = Seed: VVVGAGDVG (KRAS G13D)
LVVTAADVH

SEQ ID NO: 91039 - protein, 9 aa, synthetic construct
  source 1..9: note = Seed: VVVGAGDVG (KRAS G13D)
LVVTAADVI

SEQ ID NO: 91040 - protein, 9 aa, synthetic construct
  source 1..9: note = Seed: VVVGAGDVG (KRAS G13D)
LVVTAADVL

SEQ ID NO: 91041 - protein, 9 aa, synthetic construct
  source 1..9: note = Seed: VVVGAGDVG (KRAS G13D)
LVVTAADVM

SEQ ID NO: 91042 - protein, 9 aa, synthetic construct
  source 1..9: note = Seed: VVVGAGDVG (KRAS G13D)
LVVTAADVN

SEQ ID NO: 91043 - protein, 9 aa, synthetic construct
  source 1..9: note = Seed: VVVGAGDVG (KRAS G13D)
LVVTAADVQ

SEQ ID NO: 91044 - protein, 9 aa, synthetic construct
  source 1..9: note = Seed: VVVGAGDVG (KRAS G13D)
LVVTAADVS

SEQ ID NO: 91045 - protein, 9 aa, synthetic construct
  source 1..9: note = Seed: VVVGAGDVG (KRAS G13D)
LVVTAADVT

SEQ ID NO: 91046 - protein, 9 aa, synthetic construct
  source 1..9: note = Seed: VVVGAGDVG (KRAS G13D)
LVVTAADVV

SEQ ID NO: 91047 - protein, 9 aa, synthetic construct
  source 1..9: note = Seed: VVVGAGDVG (KRAS G13D)
LVVTADDVA

SEQ ID NO: 91048 - protein, 9 aa, synthetic construct
  source 1..9: note = Seed: VVVGAGDVG (KRAS G13D)
LVVTAGDVA

SEQ ID NO: 91049 - protein, 9 aa, synthetic construct
  source 1..9: note = Seed: VVVGAGDVG (KRAS G13D)
LVVTAGDVH

SEQ ID NO: 91050 - protein, 9 aa, synthetic construct
  source 1..9: note = Seed: VVVGAGDVG (KRAS G13D)
LVVTAGDVN

SEQ ID NO: 91051 - protein, 9 aa, synthetic construct
  source 1..9: note = Seed: VVVGAGDVG (KRAS G13D)
LVVTAGDVQ

SEQ ID NO: 91052 - protein, 9 aa, synthetic construct
  source 1..9: note = Seed: VVVGAGDVG (KRAS G13D)
LVVTAGDVS

SEQ ID NO: 91053 - protein, 9 aa, synthetic construct
  source 1..9: note = Seed: VVVGAGDVG (KRAS G13D)
LVVTAGDVT

SEQ ID NO: 91054 - protein, 9 aa, synthetic construct
  source 1..9: note = Seed: VVVGAGDVG (KRAS G13D)
LVVTAGDVV

SEQ ID NO: 91055 - protein, 9 aa, synthetic construct
  source 1..9: note = Seed: VVVGAGDVG (KRAS G13D)
LVVTAIDVA

SEQ ID NO: 91056 - protein, 9 aa, synthetic construct
  source 1..9: note = Seed: VVVGAGDVG (KRAS G13D)
LVVTAIDVS

SEQ ID NO: 91057 - protein, 9 aa, synthetic construct
  source 1..9: note = Seed: VVVGAGDVG (KRAS G13D)
LVVTANDVA

SEQ ID NO: 91058 - protein, 9 aa, synthetic construct
  source 1..9: note = Seed: VVVGAGDVG (KRAS G13D)
LVVTANDVC

SEQ ID NO: 91059 - protein, 9 aa, synthetic construct
  source 1..9: note = Seed: VVVGAGDVG (KRAS G13D)
LVVTANDVG

SEQ ID NO: 91060 - protein, 9 aa, synthetic construct
  source 1..9: note = Seed: VVVGAGDVG (KRAS G13D)
LVVTANDVH

SEQ ID NO: 91061 - protein, 9 aa, synthetic construct
  source 1..9: note = Seed: VVVGAGDVG (KRAS G13D)
LVVTANDVI

SEQ ID NO: 91062 - protein, 9 aa, synthetic construct
  source 1..9: note = Seed: VVVGAGDVG (KRAS G13D)
LVVTANDVL

SEQ ID NO: 91063 - protein, 9 aa, synthetic construct
  source 1..9: note = Seed: VVVGAGDVG (KRAS G13D)
LVVTANDVM

SEQ ID NO: 91064 - protein, 9 aa, synthetic construct
  source 1..9: note = Seed: VVVGAGDVG (KRAS G13D)
LVVTANDVN

SEQ ID NO: 91065 - protein, 9 aa, synthetic construct
  source 1..9: note = Seed: VVVGAGDVG (KRAS G13D)
LVVTANDVQ

SEQ ID NO: 91066 - protein, 9 aa, synthetic construct
  source 1..9: note = Seed: VVVGAGDVG (KRAS G13D)
LVVTANDVS

SEQ ID NO: 91067 - protein, 9 aa, synthetic construct
  source 1..9: note = Seed: VVVGAGDVG (KRAS G13D)
LVVTANDVT

SEQ ID NO: 91068 - protein, 9 aa, synthetic construct
  source 1..9: note = Seed: VVVGAGDVG (KRAS G13D)
LVVTANDVV

SEQ ID NO: 91069 - protein, 9 aa, synthetic construct
  source 1..9: note = Seed: VVVGAGDVG (KRAS G13D)
LVVTANDVY

SEQ ID NO: 91070 - protein, 9 aa, synthetic construct
  source 1..9: note = Seed: VVVGAGDVG (KRAS G13D)
LVVTAPDVA

SEQ ID NO: 91071 - protein, 9 aa, synthetic construct
  source 1..9: note = Seed: VVVGAGDVG (KRAS G13D)
LVVTAPDVG

SEQ ID NO: 91072 - protein, 9 aa, synthetic construct
  source 1..9: note = Seed: VVVGAGDVG (KRAS G13D)
LVVTAPDVH

SEQ ID NO: 91073 - protein, 9 aa, synthetic construct
  source 1..9: note = Seed: VVVGAGDVG (KRAS G13D)
LVVTAPDVI

SEQ ID NO: 91074 - protein, 9 aa, synthetic construct
  source 1..9: note = Seed: VVVGAGDVG (KRAS G13D)
LVVTAPDVL

SEQ ID NO: 91075 - protein, 9 aa, synthetic construct
  source 1..9: note = Seed: VVVGAGDVG (KRAS G13D)
LVVTAPDVM

SEQ ID NO: 91076 - protein, 9 aa, synthetic construct
  source 1..9: note = Seed: VVVGAGDVG (KRAS G13D)
LVVTAPDVN

SEQ ID NO: 91077 - protein, 9 aa, synthetic construct
  source 1..9: note = Seed: VVVGAGDVG (KRAS G13D)
LVVTAPDVQ

SEQ ID NO: 91078 - protein, 9 aa, synthetic construct
  source 1..9: note = Seed: VVVGAGDVG (KRAS G13D)
LVVTAPDVS

SEQ ID NO: 91079 - protein, 9 aa, synthetic construct
  source 1..9: note = Seed: VVVGAGDVG (KRAS G13D)
LVVTAPDVT

SEQ ID NO: 91080 - protein, 9 aa, synthetic construct
  source 1..9: note = Seed: VVVGAGDVG (KRAS G13D)
LVVTAPDVV

SEQ ID NO: 91081 - protein, 9 aa, synthetic construct
  source 1..9: note = Seed: VVVGAGDVG (KRAS G13D)
LVVTASDVA

SEQ ID NO: 91082 - protein, 9 aa, synthetic construct
  source 1..9: note = Seed: VVVGAGDVG (KRAS G13D)
LVVTASDVC

SEQ ID NO: 91083 - protein, 9 aa, synthetic construct
  source 1..9: note = Seed: VVVGAGDVG (KRAS G13D)
LVVTASDVD

SEQ ID NO: 91084 - protein, 9 aa, synthetic construct
  source 1..9: note = Seed: VVVGAGDVG (KRAS G13D)
LVVTASDVG

SEQ ID NO: 91085 - protein, 9 aa, synthetic construct
  source 1..9: note = Seed: VVVGAGDVG (KRAS G13D)
LVVTASDVH

SEQ ID NO: 91086 - protein, 9 aa, synthetic construct
  source 1..9: note = Seed: VVVGAGDVG (KRAS G13D)
LVVTASDVI

SEQ ID NO: 91087 - protein, 9 aa, synthetic construct
  source 1..9: note = Seed: VVVGAGDVG (KRAS G13D)
LVVTASDVL

SEQ ID NO: 91088 - protein, 9 aa, synthetic construct
  source 1..9: note = Seed: VVVGAGDVG (KRAS G13D)
LVVTASDVM

SEQ ID NO: 91089 - protein, 9 aa, synthetic construct
  source 1..9: note = Seed: VVVGAGDVG (KRAS G13D)
LVVTASDVN

SEQ ID NO: 91090 - protein, 9 aa, synthetic construct
  source 1..9: note = Seed: VVVGAGDVG (KRAS G13D)
LVVTASDVQ

SEQ ID NO: 91091 - protein, 9 aa, synthetic construct
  source 1..9: note = Seed: VVVGAGDVG (KRAS G13D)
LVVTASDVS

SEQ ID NO: 91092 - protein, 9 aa, synthetic construct
  source 1..9: note = Seed: VVVGAGDVG (KRAS G13D)
LVVTASDVT

SEQ ID NO: 91093 - protein, 9 aa, synthetic construct
  source 1..9: note = Seed: VVVGAGDVG (KRAS G13D)
LVVTASDVV

SEQ ID NO: 91094 - protein, 9 aa, synthetic construct
  source 1..9: note = Seed: VVVGAGDVG (KRAS G13D)
LVVTATDVA

SEQ ID NO: 91095 - protein, 9 aa, synthetic construct
  source 1..9: note = Seed: VVVGAGDVG (KRAS G13D)
LVVTATDVD

SEQ ID NO: 91096 - protein, 9 aa, synthetic construct
  source 1..9: note = Seed: VVVGAGDVG (KRAS G13D)
LVVTATDVE

SEQ ID NO: 91097 - protein, 9 aa, synthetic construct
  source 1..9: note = Seed: VVVGAGDVG (KRAS G13D)
LVVTATDVG

SEQ ID NO: 91098 - protein, 9 aa, synthetic construct
  source 1..9: note = Seed: VVVGAGDVG (KRAS G13D)
LVVTATDVH

SEQ ID NO: 91099 - protein, 9 aa, synthetic construct
  source 1..9: note = Seed: VVVGAGDVG (KRAS G13D)
LVVTATDVI

SEQ ID NO: 91100 - protein, 9 aa, synthetic construct
  source 1..9: note = Seed: VVVGAGDVG (KRAS G13D)
LVVTATDVL

SEQ ID NO: 91101 - protein, 9 aa, synthetic construct
  source 1..9: note = Seed: VVVGAGDVG (KRAS G13D)
LVVTATDVM

SEQ ID NO: 91102 - protein, 9 aa, synthetic construct
  source 1..9: note = Seed: VVVGAGDVG (KRAS G13D)
LVVTATDVN

SEQ ID NO: 91103 - protein, 9 aa, synthetic construct
  source 1..9: note = Seed: VVVGAGDVG (KRAS G13D)
LVVTATDVQ

SEQ ID NO: 91104 - protein, 9 aa, synthetic construct
  source 1..9: note = Seed: VVVGAGDVG (KRAS G13D)
LVVTATDVS

SEQ ID NO: 91105 - protein, 9 aa, synthetic construct
  source 1..9: note = Seed: VVVGAGDVG (KRAS G13D)
LVVTATDVT

SEQ ID NO: 91106 - protein, 9 aa, synthetic construct
  source 1..9: note = Seed: VVVGAGDVG (KRAS G13D)
LVVTATDVV

SEQ ID NO: 91107 - protein, 9 aa, synthetic construct
  source 1..9: note = Seed: VVVGAGDVG (KRAS G13D)
LVVTAVDVA

SEQ ID NO: 91108 - protein, 9 aa, synthetic construct
  source 1..9: note = Seed: VVVGAGDVG (KRAS G13D)
LVVTAVDVH

SEQ ID NO: 91109 - protein, 9 aa, synthetic construct
  source 1..9: note = Seed: VVVGAGDVG (KRAS G13D)
LVVTAVDVM

SEQ ID NO: 91110 - protein, 9 aa, synthetic construct
  source 1..9: note = Seed: VVVGAGDVG (KRAS G13D)
LVVTAVDVN

SEQ ID NO: 91111 - protein, 9 aa, synthetic construct
  source 1..9: note = Seed: VVVGAGDVG (KRAS G13D)
LVVTAVDVQ

SEQ ID NO: 91112 - protein, 9 aa, synthetic construct
  source 1..9: note = Seed: VVVGAGDVG (KRAS G13D)
LVVTAVDVS

SEQ ID NO: 91113 - protein, 9 aa, synthetic construct
  source 1..9: note = Seed: VVVGAGDVG (KRAS G13D)
LVVTAVDVT

SEQ ID NO: 91114 - protein, 9 aa, synthetic construct
  source 1..9: note = Seed: VVVGAGDVG (KRAS G13D)
LVVVAADVA

SEQ ID NO: 91115 - protein, 9 aa, synthetic construct
  source 1..9: note = Seed: VVVGAGDVG (KRAS G13D)
LVVVAADVE

SEQ ID NO: 91116 - protein, 9 aa, synthetic construct
  source 1..9: note = Seed: VVVGAGDVG (KRAS G13D)
LVVVAADVH

SEQ ID NO: 91117 - protein, 9 aa, synthetic construct
  source 1..9: note = Seed: VVVGAGDVG (KRAS G13D)
LVVVAADVM

SEQ ID NO: 91118 - protein, 9 aa, synthetic construct
  source 1..9: note = Seed: VVVGAGDVG (KRAS G13D)
LVVVAADVN

SEQ ID NO: 91119 - protein, 9 aa, synthetic construct
  source 1..9: note = Seed: VVVGAGDVG (KRAS G13D)
LVVVAADVQ

SEQ ID NO: 91120 - protein, 9 aa, synthetic construct
  source 1..9: note = Seed: VVVGAGDVG (KRAS G13D)
LVVVAADVS

SEQ ID NO: 91121 - protein, 9 aa, synthetic construct
  source 1..9: note = Seed: VVVGAGDVG (KRAS G13D)
LVVVAADVT

SEQ ID NO: 91122 - protein, 9 aa, synthetic construct
  source 1..9: note = Seed: VVVGAGDVG (KRAS G13D)
LVVVAADVV

SEQ ID NO: 91123 - protein, 9 aa, synthetic construct
  source 1..9: note = Seed: VVVGAGDVG (KRAS G13D)
LVVVADDVA

SEQ ID NO: 91124 - protein, 9 aa, synthetic construct
  source 1..9: note = Seed: VVVGAGDVG (KRAS G13D)
LVVVADDVS

SEQ ID NO: 91125 - protein, 9 aa, synthetic construct
  source 1..9: note = Seed: VVVGAGDVG (KRAS G13D)
LVVVAGDVA

SEQ ID NO: 91126 - protein, 9 aa, synthetic construct
  source 1..9: note = Seed: VVVGAGDVG (KRAS G13D)
LVVVAGDVN

SEQ ID NO: 91127 - protein, 9 aa, synthetic construct
  source 1..9: note = Seed: VVVGAGDVG (KRAS G13D)
LVVVAGDVS

SEQ ID NO: 91128 - protein, 9 aa, synthetic construct
  source 1..9: note = Seed: VVVGAGDVG (KRAS G13D)
LVVVAIDVS

SEQ ID NO: 91129 - protein, 9 aa, synthetic construct
  source 1..9: note = Seed: VVVGAGDVG (KRAS G13D)
LVVVANDVA

SEQ ID NO: 91130 - protein, 9 aa, synthetic construct
  source 1..9: note = Seed: VVVGAGDVG (KRAS G13D)
LVVVANDVD

SEQ ID NO: 91131 - protein, 9 aa, synthetic construct
  source 1..9: note = Seed: VVVGAGDVG (KRAS G13D)
LVVVANDVE

SEQ ID NO: 91132 - protein, 9 aa, synthetic construct
  source 1..9: note = Seed: VVVGAGDVG (KRAS G13D)
LVVVANDVG

SEQ ID NO: 91133 - protein, 9 aa, synthetic construct
  source 1..9: note = Seed: VVVGAGDVG (KRAS G13D)
LVVVANDVH

SEQ ID NO: 91134 - protein, 9 aa, synthetic construct
  source 1..9: note = Seed: VVVGAGDVG (KRAS G13D)
LVVVANDVI

SEQ ID NO: 91135 - protein, 9 aa, synthetic construct
  source 1..9: note = Seed: VVVGAGDVG (KRAS G13D)
LVVVANDVL

SEQ ID NO: 91136 - protein, 9 aa, synthetic construct
  source 1..9: note = Seed: VVVGAGDVG (KRAS G13D)
LVVVANDVM

SEQ ID NO: 91137 - protein, 9 aa, synthetic construct
  source 1..9: note = Seed: VVVGAGDVG (KRAS G13D)
LVVVANDVN

SEQ ID NO: 91138 - protein, 9 aa, synthetic construct
  source 1..9: note = Seed: VVVGAGDVG (KRAS G13D)
LVVVANDVP

SEQ ID NO: 91139 - protein, 9 aa, synthetic construct
  source 1..9: note = Seed: VVVGAGDVG (KRAS G13D)
LVVVANDVQ

SEQ ID NO: 91140 - protein, 9 aa, synthetic construct
  source 1..9: note = Seed: VVVGAGDVG (KRAS G13D)
LVVVANDVS

SEQ ID NO: 91141 - protein, 9 aa, synthetic construct
  source 1..9: note = Seed: VVVGAGDVG (KRAS G13D)
LVVVANDVT

SEQ ID NO: 91142 - protein, 9 aa, synthetic construct
  source 1..9: note = Seed: VVVGAGDVG (KRAS G13D)
LVVVANDVV

SEQ ID NO: 91143 - protein, 9 aa, synthetic construct
  source 1..9: note = Seed: VVVGAGDVG (KRAS G13D)
LVVVAPDVA

SEQ ID NO: 91144 - protein, 9 aa, synthetic construct
  source 1..9: note = Seed: VVVGAGDVG (KRAS G13D)
LVVVAPDVG

SEQ ID NO: 91145 - protein, 9 aa, synthetic construct
  source 1..9: note = Seed: VVVGAGDVG (KRAS G13D)
LVVVAPDVH

SEQ ID NO: 91146 - protein, 9 aa, synthetic construct
  source 1..9: note = Seed: VVVGAGDVG (KRAS G13D)
LVVVAPDVI

SEQ ID NO: 91147 - protein, 9 aa, synthetic construct
  source 1..9: note = Seed: VVVGAGDVG (KRAS G13D)
LVVVAPDVL

SEQ ID NO: 91148 - protein, 9 aa, synthetic construct
  source 1..9: note = Seed: VVVGAGDVG (KRAS G13D)
LVVVAPDVM

SEQ ID NO: 91149 - protein, 9 aa, synthetic construct
  source 1..9: note = Seed: VVVGAGDVG (KRAS G13D)
LVVVAPDVN

SEQ ID NO: 91150 - protein, 9 aa, synthetic construct
  source 1..9: note = Seed: VVVGAGDVG (KRAS G13D)
LVVVAPDVQ

SEQ ID NO: 91151 - protein, 9 aa, synthetic construct
  source 1..9: note = Seed: VVVGAGDVG (KRAS G13D)
LVVVAPDVS

SEQ ID NO: 91152 - protein, 9 aa, synthetic construct
  source 1..9: note = Seed: VVVGAGDVG (KRAS G13D)
LVVVAPDVT

SEQ ID NO: 91153 - protein, 9 aa, synthetic construct
  source 1..9: note = Seed: VVVGAGDVG (KRAS G13D)
LVVVAPDVV

SEQ ID NO: 91154 - protein, 9 aa, synthetic construct
  source 1..9: note = Seed: VVVGAGDVG (KRAS G13D)
LVVVAPDVY

SEQ ID NO: 91155 - protein, 9 aa, synthetic construct
  source 1..9: note = Seed: VVVGAGDVG (KRAS G13D)
LVVVASDVA

SEQ ID NO: 91156 - protein, 9 aa, synthetic construct
  source 1..9: note = Seed: VVVGAGDVG (KRAS G13D)
LVVVASDVG

SEQ ID NO: 91157 - protein, 9 aa, synthetic construct
  source 1..9: note = Seed: VVVGAGDVG (KRAS G13D)
LVVVASDVH

SEQ ID NO: 91158 - protein, 9 aa, synthetic construct
  source 1..9: note = Seed: VVVGAGDVG (KRAS G13D)
LVVVASDVI

SEQ ID NO: 91159 - protein, 9 aa, synthetic construct
  source 1..9: note = Seed: VVVGAGDVG (KRAS G13D)
LVVVASDVL

SEQ ID NO: 91160 - protein, 9 aa, synthetic construct
  source 1..9: note = Seed: VVVGAGDVG (KRAS G13D)
LVVVASDVM

SEQ ID NO: 91161 - protein, 9 aa, synthetic construct
  source 1..9: note = Seed: VVVGAGDVG (KRAS G13D)
LVVVASDVN

SEQ ID NO: 91162 - protein, 9 aa, synthetic construct
  source 1..9: note = Seed: VVVGAGDVG (KRAS G13D)
LVVVASDVQ

SEQ ID NO: 91163 - protein, 9 aa, synthetic construct
  source 1..9: note = Seed: VVVGAGDVG (KRAS G13D)
LVVVASDVS

SEQ ID NO: 91164 - protein, 9 aa, synthetic construct
  source 1..9: note = Seed: VVVGAGDVG (KRAS G13D)
LVVVASDVT

SEQ ID NO: 91165 - protein, 9 aa, synthetic construct
  source 1..9: note = Seed: VVVGAGDVG (KRAS G13D)
LVVVASDVV

SEQ ID NO: 91166 - protein, 9 aa, synthetic construct
  source 1..9: note = Seed: VVVGAGDVG (KRAS G13D)
LVVVATDVA

SEQ ID NO: 91167 - protein, 9 aa, synthetic construct
  source 1..9: note = Seed: VVVGAGDVG (KRAS G13D)
LVVVATDVG

SEQ ID NO: 91168 - protein, 9 aa, synthetic construct
  source 1..9: note = Seed: VVVGAGDVG (KRAS G13D)
LVVVATDVH

SEQ ID NO: 91169 - protein, 9 aa, synthetic construct
  source 1..9: note = Seed: VVVGAGDVG (KRAS G13D)
LVVVATDVK

SEQ ID NO: 91170 - protein, 9 aa, synthetic construct
  source 1..9: note = Seed: VVVGAGDVG (KRAS G13D)
LVVVATDVM

SEQ ID NO: 91171 - protein, 9 aa, synthetic construct
  source 1..9: note = Seed: VVVGAGDVG (KRAS G13D)
LVVVATDVN

SEQ ID NO: 91172 - protein, 9 aa, synthetic construct
  source 1..9: note = Seed: VVVGAGDVG (KRAS G13D)
LVVVATDVQ

SEQ ID NO: 91173 - protein, 9 aa, synthetic construct
  source 1..9: note = Seed: VVVGAGDVG (KRAS G13D)
LVVVATDVR

SEQ ID NO: 91174 - protein, 9 aa, synthetic construct
  source 1..9: note = Seed: VVVGAGDVG (KRAS G13D)
LVVVATDVS

SEQ ID NO: 91175 - protein, 9 aa, synthetic construct
  source 1..9: note = Seed: VVVGAGDVG (KRAS G13D)
LVVVATDVT

SEQ ID NO: 91176 - protein, 9 aa, synthetic construct
  source 1..9: note = Seed: VVVGAGDVG (KRAS G13D)
LVVVATDVV

SEQ ID NO: 91177 - protein, 9 aa, synthetic construct
  source 1..9: note = Seed: VVVGAGDVG (KRAS G13D)
LVVVAVDVA

SEQ ID NO: 91178 - protein, 9 aa, synthetic construct
  source 1..9: note = Seed: VVVGAGDVG (KRAS G13D)
LVVVAVDVH

SEQ ID NO: 91179 - protein, 9 aa, synthetic construct
  source 1..9: note = Seed: VVVGAGDVG (KRAS G13D)
LVVVAVDVN

SEQ ID NO: 91180 - protein, 9 aa, synthetic construct
  source 1..9: note = Seed: VVVGAGDVG (KRAS G13D)
LVVVAVDVS

SEQ ID NO: 91181 - protein, 9 aa, synthetic construct
  source 1..9: note = Seed: VVVGAGDVG (KRAS G13D)
LVVWAADVA

SEQ ID NO: 91182 - protein, 9 aa, synthetic construct
  source 1..9: note = Seed: VVVGAGDVG (KRAS G13D)
LVVWAADVD

SEQ ID NO: 91183 - protein, 9 aa, synthetic construct
  source 1..9: note = Seed: VVVGAGDVG (KRAS G13D)
LVVWAADVE

SEQ ID NO: 91184 - protein, 9 aa, synthetic construct
  source 1..9: note = Seed: VVVGAGDVG (KRAS G13D)
LVVWAADVF

SEQ ID NO: 91185 - protein, 9 aa, synthetic construct
  source 1..9: note = Seed: VVVGAGDVG (KRAS G13D)
LVVWAADVG

SEQ ID NO: 91186 - protein, 9 aa, synthetic construct
  source 1..9: note = Seed: VVVGAGDVG (KRAS G13D)
LVVWAADVH

SEQ ID NO: 91187 - protein, 9 aa, synthetic construct
  source 1..9: note = Seed: VVVGAGDVG (KRAS G13D)
LVVWAADVI

SEQ ID NO: 91188 - protein, 9 aa, synthetic construct
  source 1..9: note = Seed: VVVGAGDVG (KRAS G13D)
LVVWAADVK

SEQ ID NO: 91189 - protein, 9 aa, synthetic construct
  source 1..9: note = Seed: VVVGAGDVG (KRAS G13D)
LVVWAADVL

SEQ ID NO: 91190 - protein, 9 aa, synthetic construct
  source 1..9: note = Seed: VVVGAGDVG (KRAS G13D)
LVVWAADVM

SEQ ID NO: 91191 - protein, 9 aa, synthetic construct
  source 1..9: note = Seed: VVVGAGDVG (KRAS G13D)
LVVWAADVN

SEQ ID NO: 91192 - protein, 9 aa, synthetic construct
  source 1..9: note = Seed: VVVGAGDVG (KRAS G13D)
LVVWAADVP

SEQ ID NO: 91193 - protein, 9 aa, synthetic construct
  source 1..9: note = Seed: VVVGAGDVG (KRAS G13D)
LVVWAADVQ

SEQ ID NO: 91194 - protein, 9 aa, synthetic construct
  source 1..9: note = Seed: VVVGAGDVG (KRAS G13D)
LVVWAADVR

SEQ ID NO: 91195 - protein, 9 aa, synthetic construct
  source 1..9: note = Seed: VVVGAGDVG (KRAS G13D)
LVVWAADVS

SEQ ID NO: 91196 - protein, 9 aa, synthetic construct
  source 1..9: note = Seed: VVVGAGDVG (KRAS G13D)
LVVWAADVT

SEQ ID NO: 91197 - protein, 9 aa, synthetic construct
  source 1..9: note = Seed: VVVGAGDVG (KRAS G13D)
LVVWAADVV

SEQ ID NO: 91198 - protein, 9 aa, synthetic construct
  source 1..9: note = Seed: VVVGAGDVG (KRAS G13D)
LVVWAADVW

SEQ ID NO: 91199 - protein, 9 aa, synthetic construct
  source 1..9: note = Seed: VVVGAGDVG (KRAS G13D)
LVVWAADVY

SEQ ID NO: 91200 - protein, 9 aa, synthetic construct
  source 1..9: note = Seed: VVVGAGDVG (KRAS G13D)
LVVWADDVA

SEQ ID NO: 91201 - protein, 9 aa, synthetic construct
  source 1..9: note = Seed: VVVGAGDVG (KRAS G13D)
LVVWADDVC

SEQ ID NO: 91202 - protein, 9 aa, synthetic construct
  source 1..9: note = Seed: VVVGAGDVG (KRAS G13D)
LVVWADDVD

SEQ ID NO: 91203 - protein, 9 aa, synthetic construct
  source 1..9: note = Seed: VVVGAGDVG (KRAS G13D)
LVVWADDVE

SEQ ID NO: 91204 - protein, 9 aa, synthetic construct
  source 1..9: note = Seed: VVVGAGDVG (KRAS G13D)
LVVWADDVF

SEQ ID NO: 91205 - protein, 9 aa, synthetic construct
  source 1..9: note = Seed: VVVGAGDVG (KRAS G13D)
LVVWADDVG

SEQ ID NO: 91206 - protein, 9 aa, synthetic construct
  source 1..9: note = Seed: VVVGAGDVG (KRAS G13D)
LVVWADDVH

SEQ ID NO: 91207 - protein, 9 aa, synthetic construct
  source 1..9: note = Seed: VVVGAGDVG (KRAS G13D)
LVVWADDVI

SEQ ID NO: 91208 - protein, 9 aa, synthetic construct
  source 1..9: note = Seed: VVVGAGDVG (KRAS G13D)
LVVWADDVK

SEQ ID NO: 91209 - protein, 9 aa, synthetic construct
  source 1..9: note = Seed: VVVGAGDVG (KRAS G13D)
LVVWADDVL

SEQ ID NO: 91210 - protein, 9 aa, synthetic construct
  source 1..9: note = Seed: VVVGAGDVG (KRAS G13D)
LVVWADDVM

SEQ ID NO: 91211 - protein, 9 aa, synthetic construct
  source 1..9: note = Seed: VVVGAGDVG (KRAS G13D)
LVVWADDVN

SEQ ID NO: 91212 - protein, 9 aa, synthetic construct
  source 1..9: note = Seed: VVVGAGDVG (KRAS G13D)
LVVWADDVP

SEQ ID NO: 91213 - protein, 9 aa, synthetic construct
  source 1..9: note = Seed: VVVGAGDVG (KRAS G13D)
LVVWADDVQ

SEQ ID NO: 91214 - protein, 9 aa, synthetic construct
  source 1..9: note = Seed: VVVGAGDVG (KRAS G13D)
LVVWADDVR

SEQ ID NO: 91215 - protein, 9 aa, synthetic construct
  source 1..9: note = Seed: VVVGAGDVG (KRAS G13D)
LVVWADDVS

SEQ ID NO: 91216 - protein, 9 aa, synthetic construct
  source 1..9: note = Seed: VVVGAGDVG (KRAS G13D)
LVVWADDVT

SEQ ID NO: 91217 - protein, 9 aa, synthetic construct
  source 1..9: note = Seed: VVVGAGDVG (KRAS G13D)
LVVWADDVV

SEQ ID NO: 91218 - protein, 9 aa, synthetic construct
  source 1..9: note = Seed: VVVGAGDVG (KRAS G13D)
LVVWADDVW

SEQ ID NO: 91219 - protein, 9 aa, synthetic construct
  source 1..9: note = Seed: VVVGAGDVG (KRAS G13D)
LVVWADDVY

SEQ ID NO: 91220 - protein, 9 aa, synthetic construct
  source 1..9: note = Seed: VVVGAGDVG (KRAS G13D)
LVVWAEDVA

SEQ ID NO: 91221 - protein, 9 aa, synthetic construct
  source 1..9: note = Seed: VVVGAGDVG (KRAS G13D)
LVVWAEDVF

SEQ ID NO: 91222 - protein, 9 aa, synthetic construct
  source 1..9: note = Seed: VVVGAGDVG (KRAS G13D)
LVVWAEDVI

SEQ ID NO: 91223 - protein, 9 aa, synthetic construct
  source 1..9: note = Seed: VVVGAGDVG (KRAS G13D)
LVVWAEDVL

SEQ ID NO: 91224 - protein, 9 aa, synthetic construct
  source 1..9: note = Seed: VVVGAGDVG (KRAS G13D)
LVVWAEDVM

SEQ ID NO: 91225 - protein, 9 aa, synthetic construct
  source 1..9: note = Seed: VVVGAGDVG (KRAS G13D)
LVVWAEDVS

SEQ ID NO: 91226 - protein, 9 aa, synthetic construct
  source 1..9: note = Seed: VVVGAGDVG (KRAS G13D)
LVVWAEDVV

SEQ ID NO: 91227 - protein, 9 aa, synthetic construct
  source 1..9: note = Seed: VVVGAGDVG (KRAS G13D)
LVVWAEDVW

SEQ ID NO: 91228 - protein, 9 aa, synthetic construct
  source 1..9: note = Seed: VVVGAGDVG (KRAS G13D)
LVVWAEDVY

SEQ ID NO: 91229 - protein, 9 aa, synthetic construct
  source 1..9: note = Seed: VVVGAGDVG (KRAS G13D)
LVVWAGDVA

SEQ ID NO: 91230 - protein, 9 aa, synthetic construct
  source 1..9: note = Seed: VVVGAGDVG (KRAS G13D)
LVVWAGDVF

SEQ ID NO: 91231 - protein, 9 aa, synthetic construct
  source 1..9: note = Seed: VVVGAGDVG (KRAS G13D)
LVVWAGDVI

SEQ ID NO: 91232 - protein, 9 aa, synthetic construct
  source 1..9: note = Seed: VVVGAGDVG (KRAS G13D)
LVVWAGDVL

SEQ ID NO: 91233 - protein, 9 aa, synthetic construct
  source 1..9: note = Seed: VVVGAGDVG (KRAS G13D)
LVVWAGDVM

SEQ ID NO: 91234 - protein, 9 aa, synthetic construct
  source 1..9: note = Seed: VVVGAGDVG (KRAS G13D)
LVVWAGDVS

SEQ ID NO: 91235 - protein, 9 aa, synthetic construct
  source 1..9: note = Seed: VVVGAGDVG (KRAS G13D)
LVVWAGDVV

SEQ ID NO: 91236 - protein, 9 aa, synthetic construct
  source 1..9: note = Seed: VVVGAGDVG (KRAS G13D)
LVVWAGDVY

SEQ ID NO: 91237 - protein, 9 aa, synthetic construct
  source 1..9: note = Seed: VVVGAGDVG (KRAS G13D)
LVVWAHDVA

SEQ ID NO: 91238 - protein, 9 aa, synthetic construct
  source 1..9: note = Seed: VVVGAGDVG (KRAS G13D)
LVVWAHDVF

SEQ ID NO: 91239 - protein, 9 aa, synthetic construct
  source 1..9: note = Seed: VVVGAGDVG (KRAS G13D)
LVVWAHDVI

SEQ ID NO: 91240 - protein, 9 aa, synthetic construct
  source 1..9: note = Seed: VVVGAGDVG (KRAS G13D)
LVVWAHDVL

SEQ ID NO: 91241 - protein, 9 aa, synthetic construct
  source 1..9: note = Seed: VVVGAGDVG (KRAS G13D)
LVVWAHDVM

SEQ ID NO: 91242 - protein, 9 aa, synthetic construct
  source 1..9: note = Seed: VVVGAGDVG (KRAS G13D)
LVVWAHDVQ

SEQ ID NO: 91243 - protein, 9 aa, synthetic construct
  source 1..9: note = Seed: VVVGAGDVG (KRAS G13D)
LVVWAHDVS

SEQ ID NO: 91244 - protein, 9 aa, synthetic construct
  source 1..9: note = Seed: VVVGAGDVG (KRAS G13D)
LVVWAHDVV

SEQ ID NO: 91245 - protein, 9 aa, synthetic construct
  source 1..9: note = Seed: VVVGAGDVG (KRAS G13D)
LVVWAHDVY

SEQ ID NO: 91246 - protein, 9 aa, synthetic construct
  source 1..9: note = Seed: VVVGAGDVG (KRAS G13D)
LVVWAIDVA

SEQ ID NO: 91247 - protein, 9 aa, synthetic construct
  source 1..9: note = Seed: VVVGAGDVG (KRAS G13D)
LVVWAIDVD

SEQ ID NO: 91248 - protein, 9 aa, synthetic construct
  source 1..9: note = Seed: VVVGAGDVG (KRAS G13D)
LVVWAIDVE

SEQ ID NO: 91249 - protein, 9 aa, synthetic construct
  source 1..9: note = Seed: VVVGAGDVG (KRAS G13D)
LVVWAIDVF

SEQ ID NO: 91250 - protein, 9 aa, synthetic construct
  source 1..9: note = Seed: VVVGAGDVG (KRAS G13D)
LVVWAIDVG

SEQ ID NO: 91251 - protein, 9 aa, synthetic construct
  source 1..9: note = Seed: VVVGAGDVG (KRAS G13D)
LVVWAIDVH

SEQ ID NO: 91252 - protein, 9 aa, synthetic construct
  source 1..9: note = Seed: VVVGAGDVG (KRAS G13D)
LVVWAIDVI

SEQ ID NO: 91253 - protein, 9 aa, synthetic construct
  source 1..9: note = Seed: VVVGAGDVG (KRAS G13D)
LVVWAIDVK

SEQ ID NO: 91254 - protein, 9 aa, synthetic construct
  source 1..9: note = Seed: VVVGAGDVG (KRAS G13D)
LVVWAIDVL

SEQ ID NO: 91255 - protein, 9 aa, synthetic construct
  source 1..9: note = Seed: VVVGAGDVG (KRAS G13D)
LVVWAIDVM

SEQ ID NO: 91256 - protein, 9 aa, synthetic construct
  source 1..9: note = Seed: VVVGAGDVG (KRAS G13D)
LVVWAIDVN

SEQ ID NO: 91257 - protein, 9 aa, synthetic construct
  source 1..9: note = Seed: VVVGAGDVG (KRAS G13D)
LVVWAIDVP

SEQ ID NO: 91258 - protein, 9 aa, synthetic construct
  source 1..9: note = Seed: VVVGAGDVG (KRAS G13D)
LVVWAIDVQ

SEQ ID NO: 91259 - protein, 9 aa, synthetic construct
  source 1..9: note = Seed: VVVGAGDVG (KRAS G13D)
LVVWAIDVR

SEQ ID NO: 91260 - protein, 9 aa, synthetic construct
  source 1..9: note = Seed: VVVGAGDVG (KRAS G13D)
LVVWAIDVS

SEQ ID NO: 91261 - protein, 9 aa, synthetic construct
  source 1..9: note = Seed: VVVGAGDVG (KRAS G13D)
LVVWAIDVT

SEQ ID NO: 91262 - protein, 9 aa, synthetic construct
  source 1..9: note = Seed: VVVGAGDVG (KRAS G13D)
LVVWAIDVV

SEQ ID NO: 91263 - protein, 9 aa, synthetic construct
  source 1..9: note = Seed: VVVGAGDVG (KRAS G13D)
LVVWAIDVY

SEQ ID NO: 91264 - protein, 9 aa, synthetic construct
  source 1..9: note = Seed: VVVGAGDVG (KRAS G13D)
LVVWALDVA

SEQ ID NO: 91265 - protein, 9 aa, synthetic construct
  source 1..9: note = Seed: VVVGAGDVG (KRAS G13D)
LVVWALDVE

SEQ ID NO: 91266 - protein, 9 aa, synthetic construct
  source 1..9: note = Seed: VVVGAGDVG (KRAS G13D)
LVVWALDVF

SEQ ID NO: 91267 - protein, 9 aa, synthetic construct
  source 1..9: note = Seed: VVVGAGDVG (KRAS G13D)
LVVWALDVH

SEQ ID NO: 91268 - protein, 9 aa, synthetic construct
  source 1..9: note = Seed: VVVGAGDVG (KRAS G13D)
LVVWALDVI

SEQ ID NO: 91269 - protein, 9 aa, synthetic construct
  source 1..9: note = Seed: VVVGAGDVG (KRAS G13D)
LVVWALDVL

SEQ ID NO: 91270 - protein, 9 aa, synthetic construct
  source 1..9: note = Seed: VVVGAGDVG (KRAS G13D)
LVVWALDVM

SEQ ID NO: 91271 - protein, 9 aa, synthetic construct
  source 1..9: note = Seed: VVVGAGDVG (KRAS G13D)
LVVWALDVN

SEQ ID NO: 91272 - protein, 9 aa, synthetic construct
  source 1..9: note = Seed: VVVGAGDVG (KRAS G13D)
LVVWALDVP

SEQ ID NO: 91273 - protein, 9 aa, synthetic construct
  source 1..9: note = Seed: VVVGAGDVG (KRAS G13D)
LVVWALDVQ

SEQ ID NO: 91274 - protein, 9 aa, synthetic construct
  source 1..9: note = Seed: VVVGAGDVG (KRAS G13D)
LVVWALDVS

SEQ ID NO: 91275 - protein, 9 aa, synthetic construct
  source 1..9: note = Seed: VVVGAGDVG (KRAS G13D)
LVVWALDVV

SEQ ID NO: 91276 - protein, 9 aa, synthetic construct
  source 1..9: note = Seed: VVVGAGDVG (KRAS G13D)
LVVWALDVY

SEQ ID NO: 91277 - protein, 9 aa, synthetic construct
  source 1..9: note = Seed: VVVGAGDVG (KRAS G13D)
LVVWAMDVA

SEQ ID NO: 91278 - protein, 9 aa, synthetic construct
  source 1..9: note = Seed: VVVGAGDVG (KRAS G13D)
LVVWAMDVD

SEQ ID NO: 91279 - protein, 9 aa, synthetic construct
  source 1..9: note = Seed: VVVGAGDVG (KRAS G13D)
LVVWAMDVE

SEQ ID NO: 91280 - protein, 9 aa, synthetic construct
  source 1..9: note = Seed: VVVGAGDVG (KRAS G13D)
LVVWAMDVF

SEQ ID NO: 91281 - protein, 9 aa, synthetic construct
  source 1..9: note = Seed: VVVGAGDVG (KRAS G13D)
LVVWAMDVG

SEQ ID NO: 91282 - protein, 9 aa, synthetic construct
  source 1..9: note = Seed: VVVGAGDVG (KRAS G13D)
LVVWAMDVH

SEQ ID NO: 91283 - protein, 9 aa, synthetic construct
  source 1..9: note = Seed: VVVGAGDVG (KRAS G13D)
LVVWAMDVI

SEQ ID NO: 91284 - protein, 9 aa, synthetic construct
  source 1..9: note = Seed: VVVGAGDVG (KRAS G13D)
LVVWAMDVK

SEQ ID NO: 91285 - protein, 9 aa, synthetic construct
  source 1..9: note = Seed: VVVGAGDVG (KRAS G13D)
LVVWAMDVL

SEQ ID NO: 91286 - protein, 9 aa, synthetic construct
  source 1..9: note = Seed: VVVGAGDVG (KRAS G13D)
LVVWAMDVM

SEQ ID NO: 91287 - protein, 9 aa, synthetic construct
  source 1..9: note = Seed: VVVGAGDVG (KRAS G13D)
LVVWAMDVN

SEQ ID NO: 91288 - protein, 9 aa, synthetic construct
  source 1..9: note = Seed: VVVGAGDVG (KRAS G13D)
LVVWAMDVQ

SEQ ID NO: 91289 - protein, 9 aa, synthetic construct
  source 1..9: note = Seed: VVVGAGDVG (KRAS G13D)
LVVWAMDVR

SEQ ID NO: 91290 - protein, 9 aa, synthetic construct
  source 1..9: note = Seed: VVVGAGDVG (KRAS G13D)
LVVWAMDVS

SEQ ID NO: 91291 - protein, 9 aa, synthetic construct
  source 1..9: note = Seed: VVVGAGDVG (KRAS G13D)
LVVWAMDVT

SEQ ID NO: 91292 - protein, 9 aa, synthetic construct
  source 1..9: note = Seed: VVVGAGDVG (KRAS G13D)
LVVWAMDVV

SEQ ID NO: 91293 - protein, 9 aa, synthetic construct
  source 1..9: note = Seed: VVVGAGDVG (KRAS G13D)
LVVWAMDVY

SEQ ID NO: 91294 - protein, 9 aa, synthetic construct
  source 1..9: note = Seed: VVVGAGDVG (KRAS G13D)
LVVWANDVA

SEQ ID NO: 91295 - protein, 9 aa, synthetic construct
  source 1..9: note = Seed: VVVGAGDVG (KRAS G13D)
LVVWANDVC

SEQ ID NO: 91296 - protein, 9 aa, synthetic construct
  source 1..9: note = Seed: VVVGAGDVG (KRAS G13D)
LVVWANDVD

SEQ ID NO: 91297 - protein, 9 aa, synthetic construct
  source 1..9: note = Seed: VVVGAGDVG (KRAS G13D)
LVVWANDVE

SEQ ID NO: 91298 - protein, 9 aa, synthetic construct
  source 1..9: note = Seed: VVVGAGDVG (KRAS G13D)
LVVWANDVF

SEQ ID NO: 91299 - protein, 9 aa, synthetic construct
  source 1..9: note = Seed: VVVGAGDVG (KRAS G13D)
LVVWANDVG

SEQ ID NO: 91300 - protein, 9 aa, synthetic construct
  source 1..9: note = Seed: VVVGAGDVG (KRAS G13D)
LVVWANDVH

SEQ ID NO: 91301 - protein, 9 aa, synthetic construct
  source 1..9: note = Seed: VVVGAGDVG (KRAS G13D)
LVVWANDVI

SEQ ID NO: 91302 - protein, 9 aa, synthetic construct
  source 1..9: note = Seed: VVVGAGDVG (KRAS G13D)
LVVWANDVK

SEQ ID NO: 91303 - protein, 9 aa, synthetic construct
  source 1..9: note = Seed: VVVGAGDVG (KRAS G13D)
LVVWANDVL

SEQ ID NO: 91304 - protein, 9 aa, synthetic construct
  source 1..9: note = Seed: VVVGAGDVG (KRAS G13D)
LVVWANDVM

SEQ ID NO: 91305 - protein, 9 aa, synthetic construct
  source 1..9: note = Seed: VVVGAGDVG (KRAS G13D)
LVVWANDVN

SEQ ID NO: 91306 - protein, 9 aa, synthetic construct
  source 1..9: note = Seed: VVVGAGDVG (KRAS G13D)
LVVWANDVQ

SEQ ID NO: 91307 - protein, 9 aa, synthetic construct
  source 1..9: note = Seed: VVVGAGDVG (KRAS G13D)
LVVWANDVR

SEQ ID NO: 91308 - protein, 9 aa, synthetic construct
  source 1..9: note = Seed: VVVGAGDVG (KRAS G13D)
LVVWANDVS

SEQ ID NO: 91309 - protein, 9 aa, synthetic construct
  source 1..9: note = Seed: VVVGAGDVG (KRAS G13D)
LVVWANDVT

SEQ ID NO: 91310 - protein, 9 aa, synthetic construct
  source 1..9: note = Seed: VVVGAGDVG (KRAS G13D)
LVVWANDVV

SEQ ID NO: 91311 - protein, 9 aa, synthetic construct
  source 1..9: note = Seed: VVVGAGDVG (KRAS G13D)
LVVWANDVW

SEQ ID NO: 91312 - protein, 9 aa, synthetic construct
  source 1..9: note = Seed: VVVGAGDVG (KRAS G13D)
LVVWANDVY

SEQ ID NO: 91313 - protein, 9 aa, synthetic construct
  source 1..9: note = Seed: VVVGAGDVG (KRAS G13D)
LVVWAPDVA

SEQ ID NO: 91314 - protein, 9 aa, synthetic construct
  source 1..9: note = Seed: VVVGAGDVG (KRAS G13D)
LVVWAPDVC

SEQ ID NO: 91315 - protein, 9 aa, synthetic construct
  source 1..9: note = Seed: VVVGAGDVG (KRAS G13D)
LVVWAPDVD

SEQ ID NO: 91316 - protein, 9 aa, synthetic construct
  source 1..9: note = Seed: VVVGAGDVG (KRAS G13D)
LVVWAPDVE

SEQ ID NO: 91317 - protein, 9 aa, synthetic construct
  source 1..9: note = Seed: VVVGAGDVG (KRAS G13D)
LVVWAPDVF

SEQ ID NO: 91318 - protein, 9 aa, synthetic construct
  source 1..9: note = Seed: VVVGAGDVG (KRAS G13D)
LVVWAPDVG

SEQ ID NO: 91319 - protein, 9 aa, synthetic construct
  source 1..9: note = Seed: VVVGAGDVG (KRAS G13D)
LVVWAPDVH

SEQ ID NO: 91320 - protein, 9 aa, synthetic construct
  source 1..9: note = Seed: VVVGAGDVG (KRAS G13D)
LVVWAPDVI

SEQ ID NO: 91321 - protein, 9 aa, synthetic construct
  source 1..9: note = Seed: VVVGAGDVG (KRAS G13D)
LVVWAPDVL

SEQ ID NO: 91322 - protein, 9 aa, synthetic construct
  source 1..9: note = Seed: VVVGAGDVG (KRAS G13D)
LVVWAPDVM

SEQ ID NO: 91323 - protein, 9 aa, synthetic construct
  source 1..9: note = Seed: VVVGAGDVG (KRAS G13D)
LVVWAPDVN

SEQ ID NO: 91324 - protein, 9 aa, synthetic construct
  source 1..9: note = Seed: VVVGAGDVG (KRAS G13D)
LVVWAPDVQ

SEQ ID NO: 91325 - protein, 9 aa, synthetic construct
  source 1..9: note = Seed: VVVGAGDVG (KRAS G13D)
LVVWAPDVS

SEQ ID NO: 91326 - protein, 9 aa, synthetic construct
  source 1..9: note = Seed: VVVGAGDVG (KRAS G13D)
LVVWAPDVT

SEQ ID NO: 91327 - protein, 9 aa, synthetic construct
  source 1..9: note = Seed: VVVGAGDVG (KRAS G13D)
LVVWAPDVV

SEQ ID NO: 91328 - protein, 9 aa, synthetic construct
  source 1..9: note = Seed: VVVGAGDVG (KRAS G13D)
LVVWAPDVW

SEQ ID NO: 91329 - protein, 9 aa, synthetic construct
  source 1..9: note = Seed: VVVGAGDVG (KRAS G13D)
LVVWAPDVY

SEQ ID NO: 91330 - protein, 9 aa, synthetic construct
  source 1..9: note = Seed: VVVGAGDVG (KRAS G13D)
LVVWAQDVA

SEQ ID NO: 91331 - protein, 9 aa, synthetic construct
  source 1..9: note = Seed: VVVGAGDVG (KRAS G13D)
LVVWAQDVF

SEQ ID NO: 91332 - protein, 9 aa, synthetic construct
  source 1..9: note = Seed: VVVGAGDVG (KRAS G13D)
LVVWAQDVH

SEQ ID NO: 91333 - protein, 9 aa, synthetic construct
  source 1..9: note = Seed: VVVGAGDVG (KRAS G13D)
LVVWAQDVI

SEQ ID NO: 91334 - protein, 9 aa, synthetic construct
  source 1..9: note = Seed: VVVGAGDVG (KRAS G13D)
LVVWAQDVL

SEQ ID NO: 91335 - protein, 9 aa, synthetic construct
  source 1..9: note = Seed: VVVGAGDVG (KRAS G13D)
LVVWAQDVM

SEQ ID NO: 91336 - protein, 9 aa, synthetic construct
  source 1..9: note = Seed: VVVGAGDVG (KRAS G13D)
LVVWAQDVN

SEQ ID NO: 91337 - protein, 9 aa, synthetic construct
  source 1..9: note = Seed: VVVGAGDVG (KRAS G13D)
LVVWAQDVQ

SEQ ID NO: 91338 - protein, 9 aa, synthetic construct
  source 1..9: note = Seed: VVVGAGDVG (KRAS G13D)
LVVWAQDVS

SEQ ID NO: 91339 - protein, 9 aa, synthetic construct
  source 1..9: note = Seed: VVVGAGDVG (KRAS G13D)
LVVWAQDVT

SEQ ID NO: 91340 - protein, 9 aa, synthetic construct
  source 1..9: note = Seed: VVVGAGDVG (KRAS G13D)
LVVWAQDVV

SEQ ID NO: 91341 - protein, 9 aa, synthetic construct
  source 1..9: note = Seed: VVVGAGDVG (KRAS G13D)
LVVWAQDVW

SEQ ID NO: 91342 - protein, 9 aa, synthetic construct
  source 1..9: note = Seed: VVVGAGDVG (KRAS G13D)
LVVWAQDVY

SEQ ID NO: 91343 - protein, 9 aa, synthetic construct
  source 1..9: note = Seed: VVVGAGDVG (KRAS G13D)
LVVWARDVA

SEQ ID NO: 91344 - protein, 9 aa, synthetic construct
  source 1..9: note = Seed: VVVGAGDVG (KRAS G13D)
LVVWARDVF

SEQ ID NO: 91345 - protein, 9 aa, synthetic construct
  source 1..9: note = Seed: VVVGAGDVG (KRAS G13D)
LVVWARDVL

SEQ ID NO: 91346 - protein, 9 aa, synthetic construct
  source 1..9: note = Seed: VVVGAGDVG (KRAS G13D)
LVVWARDVM

SEQ ID NO: 91347 - protein, 9 aa, synthetic construct
  source 1..9: note = Seed: VVVGAGDVG (KRAS G13D)
LVVWARDVV

SEQ ID NO: 91348 - protein, 9 aa, synthetic construct
  source 1..9: note = Seed: VVVGAGDVG (KRAS G13D)
LVVWARDVY

SEQ ID NO: 91349 - protein, 9 aa, synthetic construct
  source 1..9: note = Seed: VVVGAGDVG (KRAS G13D)
LVVWASDVA

SEQ ID NO: 91350 - protein, 9 aa, synthetic construct
  source 1..9: note = Seed: VVVGAGDVG (KRAS G13D)
LVVWASDVC

SEQ ID NO: 91351 - protein, 9 aa, synthetic construct
  source 1..9: note = Seed: VVVGAGDVG (KRAS G13D)
LVVWASDVD

SEQ ID NO: 91352 - protein, 9 aa, synthetic construct
  source 1..9: note = Seed: VVVGAGDVG (KRAS G13D)
LVVWASDVE

SEQ ID NO: 91353 - protein, 9 aa, synthetic construct
  source 1..9: note = Seed: VVVGAGDVG (KRAS G13D)
LVVWASDVF

SEQ ID NO: 91354 - protein, 9 aa, synthetic construct
  source 1..9: note = Seed: VVVGAGDVG (KRAS G13D)
LVVWASDVG

SEQ ID NO: 91355 - protein, 9 aa, synthetic construct
  source 1..9: note = Seed: VVVGAGDVG (KRAS G13D)
LVVWASDVH

SEQ ID NO: 91356 - protein, 9 aa, synthetic construct
  source 1..9: note = Seed: VVVGAGDVG (KRAS G13D)
LVVWASDVI

SEQ ID NO: 91357 - protein, 9 aa, synthetic construct
  source 1..9: note = Seed: VVVGAGDVG (KRAS G13D)
LVVWASDVK

SEQ ID NO: 91358 - protein, 9 aa, synthetic construct
  source 1..9: note = Seed: VVVGAGDVG (KRAS G13D)
LVVWASDVL

SEQ ID NO: 91359 - protein, 9 aa, synthetic construct
  source 1..9: note = Seed: VVVGAGDVG (KRAS G13D)
LVVWASDVM

SEQ ID NO: 91360 - protein, 9 aa, synthetic construct
  source 1..9: note = Seed: VVVGAGDVG (KRAS G13D)
LVVWASDVN

SEQ ID NO: 91361 - protein, 9 aa, synthetic construct
  source 1..9: note = Seed: VVVGAGDVG (KRAS G13D)
LVVWASDVP

SEQ ID NO: 91362 - protein, 9 aa, synthetic construct
  source 1..9: note = Seed: VVVGAGDVG (KRAS G13D)
LVVWASDVQ

SEQ ID NO: 91363 - protein, 9 aa, synthetic construct
  source 1..9: note = Seed: VVVGAGDVG (KRAS G13D)
LVVWASDVR

SEQ ID NO: 91364 - protein, 9 aa, synthetic construct
  source 1..9: note = Seed: VVVGAGDVG (KRAS G13D)
LVVWASDVS

SEQ ID NO: 91365 - protein, 9 aa, synthetic construct
  source 1..9: note = Seed: VVVGAGDVG (KRAS G13D)
LVVWASDVT

SEQ ID NO: 91366 - protein, 9 aa, synthetic construct
  source 1..9: note = Seed: VVVGAGDVG (KRAS G13D)
LVVWASDVV

SEQ ID NO: 91367 - protein, 9 aa, synthetic construct
  source 1..9: note = Seed: VVVGAGDVG (KRAS G13D)
LVVWASDVW

SEQ ID NO: 91368 - protein, 9 aa, synthetic construct
  source 1..9: note = Seed: VVVGAGDVG (KRAS G13D)
LVVWASDVY

SEQ ID NO: 91369 - protein, 9 aa, synthetic construct
  source 1..9: note = Seed: VVVGAGDVG (KRAS G13D)
LVVWATDVA

SEQ ID NO: 91370 - protein, 9 aa, synthetic construct
  source 1..9: note = Seed: VVVGAGDVG (KRAS G13D)
LVVWATDVE

SEQ ID NO: 91371 - protein, 9 aa, synthetic construct
  source 1..9: note = Seed: VVVGAGDVG (KRAS G13D)
LVVWATDVF

SEQ ID NO: 91372 - protein, 9 aa, synthetic construct
  source 1..9: note = Seed: VVVGAGDVG (KRAS G13D)
LVVWATDVG

SEQ ID NO: 91373 - protein, 9 aa, synthetic construct
  source 1..9: note = Seed: VVVGAGDVG (KRAS G13D)
LVVWATDVH

SEQ ID NO: 91374 - protein, 9 aa, synthetic construct
  source 1..9: note = Seed: VVVGAGDVG (KRAS G13D)
LVVWATDVI

SEQ ID NO: 91375 - protein, 9 aa, synthetic construct
  source 1..9: note = Seed: VVVGAGDVG (KRAS G13D)
LVVWATDVL

SEQ ID NO: 91376 - protein, 9 aa, synthetic construct
  source 1..9: note = Seed: VVVGAGDVG (KRAS G13D)
LVVWATDVM

SEQ ID NO: 91377 - protein, 9 aa, synthetic construct
  source 1..9: note = Seed: VVVGAGDVG (KRAS G13D)
LVVWATDVN

SEQ ID NO: 91378 - protein, 9 aa, synthetic construct
  source 1..9: note = Seed: VVVGAGDVG (KRAS G13D)
LVVWATDVP

SEQ ID NO: 91379 - protein, 9 aa, synthetic construct
  source 1..9: note = Seed: VVVGAGDVG (KRAS G13D)
LVVWATDVQ

SEQ ID NO: 91380 - protein, 9 aa, synthetic construct
  source 1..9: note = Seed: VVVGAGDVG (KRAS G13D)
LVVWATDVR

SEQ ID NO: 91381 - protein, 9 aa, synthetic construct
  source 1..9: note = Seed: VVVGAGDVG (KRAS G13D)
LVVWATDVS

SEQ ID NO: 91382 - protein, 9 aa, synthetic construct
  source 1..9: note = Seed: VVVGAGDVG (KRAS G13D)
LVVWATDVT

SEQ ID NO: 91383 - protein, 9 aa, synthetic construct
  source 1..9: note = Seed: VVVGAGDVG (KRAS G13D)
LVVWATDVV

SEQ ID NO: 91384 - protein, 9 aa, synthetic construct
  source 1..9: note = Seed: VVVGAGDVG (KRAS G13D)
LVVWATDVY

SEQ ID NO: 91385 - protein, 9 aa, synthetic construct
  source 1..9: note = Seed: VVVGAGDVG (KRAS G13D)
LVVWAVDVA

SEQ ID NO: 91386 - protein, 9 aa, synthetic construct
  source 1..9: note = Seed: VVVGAGDVG (KRAS G13D)
LVVWAVDVE

SEQ ID NO: 91387 - protein, 9 aa, synthetic construct
  source 1..9: note = Seed: VVVGAGDVG (KRAS G13D)
LVVWAVDVF

SEQ ID NO: 91388 - protein, 9 aa, synthetic construct
  source 1..9: note = Seed: VVVGAGDVG (KRAS G13D)
LVVWAVDVG

SEQ ID NO: 91389 - protein, 9 aa, synthetic construct
  source 1..9: note = Seed: VVVGAGDVG (KRAS G13D)
LVVWAVDVH

SEQ ID NO: 91390 - protein, 9 aa, synthetic construct
  source 1..9: note = Seed: VVVGAGDVG (KRAS G13D)
LVVWAVDVI

SEQ ID NO: 91391 - protein, 9 aa, synthetic construct
  source 1..9: note = Seed: VVVGAGDVG (KRAS G13D)
LVVWAVDVL

SEQ ID NO: 91392 - protein, 9 aa, synthetic construct
  source 1..9: note = Seed: VVVGAGDVG (KRAS G13D)
LVVWAVDVM

SEQ ID NO: 91393 - protein, 9 aa, synthetic construct
  source 1..9: note = Seed: VVVGAGDVG (KRAS G13D)
LVVWAVDVN

SEQ ID NO: 91394 - protein, 9 aa, synthetic construct
  source 1..9: note = Seed: VVVGAGDVG (KRAS G13D)
LVVWAVDVQ

SEQ ID NO: 91395 - protein, 9 aa, synthetic construct
  source 1..9: note = Seed: VVVGAGDVG (KRAS G13D)
LVVWAVDVR

SEQ ID NO: 91396 - protein, 9 aa, synthetic construct
  source 1..9: note = Seed: VVVGAGDVG (KRAS G13D)
LVVWAVDVS

SEQ ID NO: 91397 - protein, 9 aa, synthetic construct
  source 1..9: note = Seed: VVVGAGDVG (KRAS G13D)
LVVWAVDVT

SEQ ID NO: 91398 - protein, 9 aa, synthetic construct
  source 1..9: note = Seed: VVVGAGDVG (KRAS G13D)
LVVWAVDVV

SEQ ID NO: 91399 - protein, 9 aa, synthetic construct
  source 1..9: note = Seed: VVVGAGDVG (KRAS G13D)
LVVWAVDVY

SEQ ID NO: 91400 - protein, 9 aa, synthetic construct
  source 1..9: note = Seed: VVVGAGDVG (KRAS G13D)
LVVYAADVA

SEQ ID NO: 91401 - protein, 9 aa, synthetic construct
  source 1..9: note = Seed: VVVGAGDVG (KRAS G13D)
LVVYAADVD

SEQ ID NO: 91402 - protein, 9 aa, synthetic construct
  source 1..9: note = Seed: VVVGAGDVG (KRAS G13D)
LVVYAADVE

SEQ ID NO: 91403 - protein, 9 aa, synthetic construct
  source 1..9: note = Seed: VVVGAGDVG (KRAS G13D)
LVVYAADVF

SEQ ID NO: 91404 - protein, 9 aa, synthetic construct
  source 1..9: note = Seed: VVVGAGDVG (KRAS G13D)
LVVYAADVG

SEQ ID NO: 91405 - protein, 9 aa, synthetic construct
  source 1..9: note = Seed: VVVGAGDVG (KRAS G13D)
LVVYAADVI

SEQ ID NO: 91406 - protein, 9 aa, synthetic construct
  source 1..9: note = Seed: VVVGAGDVG (KRAS G13D)
LVVYAADVK

SEQ ID NO: 91407 - protein, 9 aa, synthetic construct
  source 1..9: note = Seed: VVVGAGDVG (KRAS G13D)
LVVYAADVL

SEQ ID NO: 91408 - protein, 9 aa, synthetic construct
  source 1..9: note = Seed: VVVGAGDVG (KRAS G13D)
LVVYAADVM

SEQ ID NO: 91409 - protein, 9 aa, synthetic construct
  source 1..9: note = Seed: VVVGAGDVG (KRAS G13D)
LVVYAADVN

SEQ ID NO: 91410 - protein, 9 aa, synthetic construct
  source 1..9: note = Seed: VVVGAGDVG (KRAS G13D)
LVVYAADVP

SEQ ID NO: 91411 - protein, 9 aa, synthetic construct
  source 1..9: note = Seed: VVVGAGDVG (KRAS G13D)
LVVYAADVQ

SEQ ID NO: 91412 - protein, 9 aa, synthetic construct
  source 1..9: note = Seed: VVVGAGDVG (KRAS G13D)
LVVYAADVR

SEQ ID NO: 91413 - protein, 9 aa, synthetic construct
  source 1..9: note = Seed: VVVGAGDVG (KRAS G13D)
LVVYAADVS

SEQ ID NO: 91414 - protein, 9 aa, synthetic construct
  source 1..9: note = Seed: VVVGAGDVG (KRAS G13D)
LVVYAADVT

SEQ ID NO: 91415 - protein, 9 aa, synthetic construct
  source 1..9: note = Seed: VVVGAGDVG (KRAS G13D)
LVVYAADVV

SEQ ID NO: 91416 - protein, 9 aa, synthetic construct
  source 1..9: note = Seed: VVVGAGDVG (KRAS G13D)
LVVYAADVY

SEQ ID NO: 91417 - protein, 9 aa, synthetic construct
  source 1..9: note = Seed: VVVGAGDVG (KRAS G13D)
LVVYADDVA

SEQ ID NO: 91418 - protein, 9 aa, synthetic construct
  source 1..9: note = Seed: VVVGAGDVG (KRAS G13D)
LVVYADDVC

SEQ ID NO: 91419 - protein, 9 aa, synthetic construct
  source 1..9: note = Seed: VVVGAGDVG (KRAS G13D)
LVVYADDVD

SEQ ID NO: 91420 - protein, 9 aa, synthetic construct
  source 1..9: note = Seed: VVVGAGDVG (KRAS G13D)
LVVYADDVE

SEQ ID NO: 91421 - protein, 9 aa, synthetic construct
  source 1..9: note = Seed: VVVGAGDVG (KRAS G13D)
LVVYADDVF

SEQ ID NO: 91422 - protein, 9 aa, synthetic construct
  source 1..9: note = Seed: VVVGAGDVG (KRAS G13D)
LVVYADDVG

SEQ ID NO: 91423 - protein, 9 aa, synthetic construct
  source 1..9: note = Seed: VVVGAGDVG (KRAS G13D)
LVVYADDVH

SEQ ID NO: 91424 - protein, 9 aa, synthetic construct
  source 1..9: note = Seed: VVVGAGDVG (KRAS G13D)
LVVYADDVI

SEQ ID NO: 91425 - protein, 9 aa, synthetic construct
  source 1..9: note = Seed: VVVGAGDVG (KRAS G13D)
LVVYADDVL

SEQ ID NO: 91426 - protein, 9 aa, synthetic construct
  source 1..9: note = Seed: VVVGAGDVG (KRAS G13D)
LVVYADDVM

SEQ ID NO: 91427 - protein, 9 aa, synthetic construct
  source 1..9: note = Seed: VVVGAGDVG (KRAS G13D)
LVVYADDVN

SEQ ID NO: 91428 - protein, 9 aa, synthetic construct
  source 1..9: note = Seed: VVVGAGDVG (KRAS G13D)
LVVYADDVP

SEQ ID NO: 91429 - protein, 9 aa, synthetic construct
  source 1..9: note = Seed: VVVGAGDVG (KRAS G13D)
LVVYADDVQ

SEQ ID NO: 91430 - protein, 9 aa, synthetic construct
  source 1..9: note = Seed: VVVGAGDVG (KRAS G13D)
LVVYADDVR

SEQ ID NO: 91431 - protein, 9 aa, synthetic construct
  source 1..9: note = Seed: VVVGAGDVG (KRAS G13D)
LVVYADDVS

SEQ ID NO: 91432 - protein, 9 aa, synthetic construct
  source 1..9: note = Seed: VVVGAGDVG (KRAS G13D)
LVVYADDVT

SEQ ID NO: 91433 - protein, 9 aa, synthetic construct
  source 1..9: note = Seed: VVVGAGDVG (KRAS G13D)
LVVYADDVV

SEQ ID NO: 91434 - protein, 9 aa, synthetic construct
  source 1..9: note = Seed: VVVGAGDVG (KRAS G13D)
LVVYADDVW

SEQ ID NO: 91435 - protein, 9 aa, synthetic construct
  source 1..9: note = Seed: VVVGAGDVG (KRAS G13D)
LVVYADDVY

SEQ ID NO: 91436 - protein, 9 aa, synthetic construct
  source 1..9: note = Seed: VVVGAGDVG (KRAS G13D)
LVVYAEDVA

SEQ ID NO: 91437 - protein, 9 aa, synthetic construct
  source 1..9: note = Seed: VVVGAGDVG (KRAS G13D)
LVVYAEDVF

SEQ ID NO: 91438 - protein, 9 aa, synthetic construct
  source 1..9: note = Seed: VVVGAGDVG (KRAS G13D)
LVVYAEDVI

SEQ ID NO: 91439 - protein, 9 aa, synthetic construct
  source 1..9: note = Seed: VVVGAGDVG (KRAS G13D)
LVVYAEDVL

SEQ ID NO: 91440 - protein, 9 aa, synthetic construct
  source 1..9: note = Seed: VVVGAGDVG (KRAS G13D)
LVVYAEDVM

SEQ ID NO: 91441 - protein, 9 aa, synthetic construct
  source 1..9: note = Seed: VVVGAGDVG (KRAS G13D)
LVVYAEDVS

SEQ ID NO: 91442 - protein, 9 aa, synthetic construct
  source 1..9: note = Seed: VVVGAGDVG (KRAS G13D)
LVVYAEDVV

SEQ ID NO: 91443 - protein, 9 aa, synthetic construct
  source 1..9: note = Seed: VVVGAGDVG (KRAS G13D)
LVVYAGDVA

SEQ ID NO: 91444 - protein, 9 aa, synthetic construct
  source 1..9: note = Seed: VVVGAGDVG (KRAS G13D)
LVVYAGDVI

SEQ ID NO: 91445 - protein, 9 aa, synthetic construct
  source 1..9: note = Seed: VVVGAGDVG (KRAS G13D)
LVVYAGDVL

SEQ ID NO: 91446 - protein, 9 aa, synthetic construct
  source 1..9: note = Seed: VVVGAGDVG (KRAS G13D)
LVVYAGDVV

SEQ ID NO: 91447 - protein, 9 aa, synthetic construct
  source 1..9: note = Seed: VVVGAGDVG (KRAS G13D)
LVVYAIDVA

SEQ ID NO: 91448 - protein, 9 aa, synthetic construct
  source 1..9: note = Seed: VVVGAGDVG (KRAS G13D)
LVVYAIDVD

SEQ ID NO: 91449 - protein, 9 aa, synthetic construct
  source 1..9: note = Seed: VVVGAGDVG (KRAS G13D)
LVVYAIDVE

SEQ ID NO: 91450 - protein, 9 aa, synthetic construct
  source 1..9: note = Seed: VVVGAGDVG (KRAS G13D)
LVVYAIDVF

SEQ ID NO: 91451 - protein, 9 aa, synthetic construct
  source 1..9: note = Seed: VVVGAGDVG (KRAS G13D)
LVVYAIDVH

SEQ ID NO: 91452 - protein, 9 aa, synthetic construct
  source 1..9: note = Seed: VVVGAGDVG (KRAS G13D)
LVVYAIDVI

SEQ ID NO: 91453 - protein, 9 aa, synthetic construct
  source 1..9: note = Seed: VVVGAGDVG (KRAS G13D)
LVVYAIDVL

SEQ ID NO: 91454 - protein, 9 aa, synthetic construct
  source 1..9: note = Seed: VVVGAGDVG (KRAS G13D)
LVVYAIDVM

SEQ ID NO: 91455 - protein, 9 aa, synthetic construct
  source 1..9: note = Seed: VVVGAGDVG (KRAS G13D)
LVVYAIDVN

SEQ ID NO: 91456 - protein, 9 aa, synthetic construct
  source 1..9: note = Seed: VVVGAGDVG (KRAS G13D)
LVVYAIDVQ

SEQ ID NO: 91457 - protein, 9 aa, synthetic construct
  source 1..9: note = Seed: VVVGAGDVG (KRAS G13D)
LVVYAIDVR

SEQ ID NO: 91458 - protein, 9 aa, synthetic construct
  source 1..9: note = Seed: VVVGAGDVG (KRAS G13D)
LVVYAIDVS

SEQ ID NO: 91459 - protein, 9 aa, synthetic construct
  source 1..9: note = Seed: VVVGAGDVG (KRAS G13D)
LVVYAIDVV

SEQ ID NO: 91460 - protein, 9 aa, synthetic construct
  source 1..9: note = Seed: VVVGAGDVG (KRAS G13D)
LVVYAIDVY

SEQ ID NO: 91461 - protein, 9 aa, synthetic construct
  source 1..9: note = Seed: VVVGAGDVG (KRAS G13D)
LVVYALDVA

SEQ ID NO: 91462 - protein, 9 aa, synthetic construct
  source 1..9: note = Seed: VVVGAGDVG (KRAS G13D)
LVVYALDVE

SEQ ID NO: 91463 - protein, 9 aa, synthetic construct
  source 1..9: note = Seed: VVVGAGDVG (KRAS G13D)
LVVYALDVH

SEQ ID NO: 91464 - protein, 9 aa, synthetic construct
  source 1..9: note = Seed: VVVGAGDVG (KRAS G13D)
LVVYALDVM

SEQ ID NO: 91465 - protein, 9 aa, synthetic construct
  source 1..9: note = Seed: VVVGAGDVG (KRAS G13D)
LVVYALDVP

SEQ ID NO: 91466 - protein, 9 aa, synthetic construct
  source 1..9: note = Seed: VVVGAGDVG (KRAS G13D)
LVVYALDVQ

SEQ ID NO: 91467 - protein, 9 aa, synthetic construct
  source 1..9: note = Seed: VVVGAGDVG (KRAS G13D)
LVVYALDVR

SEQ ID NO: 91468 - protein, 9 aa, synthetic construct
  source 1..9: note = Seed: VVVGAGDVG (KRAS G13D)
LVVYALDVV

SEQ ID NO: 91469 - protein, 9 aa, synthetic construct
  source 1..9: note = Seed: VVVGAGDVG (KRAS G13D)
LVVYALDVY

SEQ ID NO: 91470 - protein, 9 aa, synthetic construct
  source 1..9: note = Seed: VVVGAGDVG (KRAS G13D)
LVVYAMDVA

SEQ ID NO: 91471 - protein, 9 aa, synthetic construct
  source 1..9: note = Seed: VVVGAGDVG (KRAS G13D)
LVVYAMDVD

SEQ ID NO: 91472 - protein, 9 aa, synthetic construct
  source 1..9: note = Seed: VVVGAGDVG (KRAS G13D)
LVVYAMDVE

SEQ ID NO: 91473 - protein, 9 aa, synthetic construct
  source 1..9: note = Seed: VVVGAGDVG (KRAS G13D)
LVVYAMDVF

SEQ ID NO: 91474 - protein, 9 aa, synthetic construct
  source 1..9: note = Seed: VVVGAGDVG (KRAS G13D)
LVVYAMDVH

SEQ ID NO: 91475 - protein, 9 aa, synthetic construct
  source 1..9: note = Seed: VVVGAGDVG (KRAS G13D)
LVVYAMDVI

SEQ ID NO: 91476 - protein, 9 aa, synthetic construct
  source 1..9: note = Seed: VVVGAGDVG (KRAS G13D)
LVVYAMDVL

SEQ ID NO: 91477 - protein, 9 aa, synthetic construct
  source 1..9: note = Seed: VVVGAGDVG (KRAS G13D)
LVVYAMDVM

SEQ ID NO: 91478 - protein, 9 aa, synthetic construct
  source 1..9: note = Seed: VVVGAGDVG (KRAS G13D)
LVVYAMDVQ

SEQ ID NO: 91479 - protein, 9 aa, synthetic construct
  source 1..9: note = Seed: VVVGAGDVG (KRAS G13D)
LVVYAMDVR

SEQ ID NO: 91480 - protein, 9 aa, synthetic construct
  source 1..9: note = Seed: VVVGAGDVG (KRAS G13D)
LVVYAMDVS

SEQ ID NO: 91481 - protein, 9 aa, synthetic construct
  source 1..9: note = Seed: VVVGAGDVG (KRAS G13D)
LVVYAMDVV

SEQ ID NO: 91482 - protein, 9 aa, synthetic construct
  source 1..9: note = Seed: VVVGAGDVG (KRAS G13D)
LVVYAMDVY

SEQ ID NO: 91483 - protein, 9 aa, synthetic construct
  source 1..9: note = Seed: VVVGAGDVG (KRAS G13D)
LVVYANDVA

SEQ ID NO: 91484 - protein, 9 aa, synthetic construct
  source 1..9: note = Seed: VVVGAGDVG (KRAS G13D)
LVVYANDVC

SEQ ID NO: 91485 - protein, 9 aa, synthetic construct
  source 1..9: note = Seed: VVVGAGDVG (KRAS G13D)
LVVYANDVD

SEQ ID NO: 91486 - protein, 9 aa, synthetic construct
  source 1..9: note = Seed: VVVGAGDVG (KRAS G13D)
LVVYANDVE

SEQ ID NO: 91487 - protein, 9 aa, synthetic construct
  source 1..9: note = Seed: VVVGAGDVG (KRAS G13D)
LVVYANDVF

SEQ ID NO: 91488 - protein, 9 aa, synthetic construct
  source 1..9: note = Seed: VVVGAGDVG (KRAS G13D)
LVVYANDVG

SEQ ID NO: 91489 - protein, 9 aa, synthetic construct
  source 1..9: note = Seed: VVVGAGDVG (KRAS G13D)
LVVYANDVH

SEQ ID NO: 91490 - protein, 9 aa, synthetic construct
  source 1..9: note = Seed: VVVGAGDVG (KRAS G13D)
LVVYANDVI

SEQ ID NO: 91491 - protein, 9 aa, synthetic construct
  source 1..9: note = Seed: VVVGAGDVG (KRAS G13D)
LVVYANDVK

SEQ ID NO: 91492 - protein, 9 aa, synthetic construct
  source 1..9: note = Seed: VVVGAGDVG (KRAS G13D)
LVVYANDVL

SEQ ID NO: 91493 - protein, 9 aa, synthetic construct
  source 1..9: note = Seed: VVVGAGDVG (KRAS G13D)
LVVYANDVM

SEQ ID NO: 91494 - protein, 9 aa, synthetic construct
  source 1..9: note = Seed: VVVGAGDVG (KRAS G13D)
LVVYANDVN

SEQ ID NO: 91495 - protein, 9 aa, synthetic construct
  source 1..9: note = Seed: VVVGAGDVG (KRAS G13D)
LVVYANDVQ

SEQ ID NO: 91496 - protein, 9 aa, synthetic construct
  source 1..9: note = Seed: VVVGAGDVG (KRAS G13D)
LVVYANDVR

SEQ ID NO: 91497 - protein, 9 aa, synthetic construct
  source 1..9: note = Seed: VVVGAGDVG (KRAS G13D)
LVVYANDVS

SEQ ID NO: 91498 - protein, 9 aa, synthetic construct
  source 1..9: note = Seed: VVVGAGDVG (KRAS G13D)
LVVYANDVT

SEQ ID NO: 91499 - protein, 9 aa, synthetic construct
  source 1..9: note = Seed: VVVGAGDVG (KRAS G13D)
LVVYANDVV

SEQ ID NO: 91500 - protein, 9 aa, synthetic construct
  source 1..9: note = Seed: VVVGAGDVG (KRAS G13D)
LVVYANDVW

SEQ ID NO: 91501 - protein, 9 aa, synthetic construct
  source 1..9: note = Seed: VVVGAGDVG (KRAS G13D)
LVVYANDVY

SEQ ID NO: 91502 - protein, 9 aa, synthetic construct
  source 1..9: note = Seed: VVVGAGDVG (KRAS G13D)
LVVYAPDVA

SEQ ID NO: 91503 - protein, 9 aa, synthetic construct
  source 1..9: note = Seed: VVVGAGDVG (KRAS G13D)
LVVYAPDVC

SEQ ID NO: 91504 - protein, 9 aa, synthetic construct
  source 1..9: note = Seed: VVVGAGDVG (KRAS G13D)
LVVYAPDVD

SEQ ID NO: 91505 - protein, 9 aa, synthetic construct
  source 1..9: note = Seed: VVVGAGDVG (KRAS G13D)
LVVYAPDVE

SEQ ID NO: 91506 - protein, 9 aa, synthetic construct
  source 1..9: note = Seed: VVVGAGDVG (KRAS G13D)
LVVYAPDVF

SEQ ID NO: 91507 - protein, 9 aa, synthetic construct
  source 1..9: note = Seed: VVVGAGDVG (KRAS G13D)
LVVYAPDVG

SEQ ID NO: 91508 - protein, 9 aa, synthetic construct
  source 1..9: note = Seed: VVVGAGDVG (KRAS G13D)
LVVYAPDVH

SEQ ID NO: 91509 - protein, 9 aa, synthetic construct
  source 1..9: note = Seed: VVVGAGDVG (KRAS G13D)
LVVYAPDVI

SEQ ID NO: 91510 - protein, 9 aa, synthetic construct
  source 1..9: note = Seed: VVVGAGDVG (KRAS G13D)
LVVYAPDVL

SEQ ID NO: 91511 - protein, 9 aa, synthetic construct
  source 1..9: note = Seed: VVVGAGDVG (KRAS G13D)
LVVYAPDVM

SEQ ID NO: 91512 - protein, 9 aa, synthetic construct
  source 1..9: note = Seed: VVVGAGDVG (KRAS G13D)
LVVYAPDVN

SEQ ID NO: 91513 - protein, 9 aa, synthetic construct
  source 1..9: note = Seed: VVVGAGDVG (KRAS G13D)
LVVYAPDVQ

SEQ ID NO: 91514 - protein, 9 aa, synthetic construct
  source 1..9: note = Seed: VVVGAGDVG (KRAS G13D)
LVVYAPDVR

SEQ ID NO: 91515 - protein, 9 aa, synthetic construct
  source 1..9: note = Seed: VVVGAGDVG (KRAS G13D)
LVVYAPDVS

SEQ ID NO: 91516 - protein, 9 aa, synthetic construct
  source 1..9: note = Seed: VVVGAGDVG (KRAS G13D)
LVVYAPDVT

SEQ ID NO: 91517 - protein, 9 aa, synthetic construct
  source 1..9: note = Seed: VVVGAGDVG (KRAS G13D)
LVVYAPDVV

SEQ ID NO: 91518 - protein, 9 aa, synthetic construct
  source 1..9: note = Seed: VVVGAGDVG (KRAS G13D)
LVVYAPDVW

SEQ ID NO: 91519 - protein, 9 aa, synthetic construct
  source 1..9: note = Seed: VVVGAGDVG (KRAS G13D)
LVVYAPDVY

SEQ ID NO: 91520 - protein, 9 aa, synthetic construct
  source 1..9: note = Seed: VVVGAGDVG (KRAS G13D)
LVVYAQDVA

SEQ ID NO: 91521 - protein, 9 aa, synthetic construct
  source 1..9: note = Seed: VVVGAGDVG (KRAS G13D)
LVVYAQDVI

SEQ ID NO: 91522 - protein, 9 aa, synthetic construct
  source 1..9: note = Seed: VVVGAGDVG (KRAS G13D)
LVVYAQDVL

SEQ ID NO: 91523 - protein, 9 aa, synthetic construct
  source 1..9: note = Seed: VVVGAGDVG (KRAS G13D)
LVVYAQDVM

SEQ ID NO: 91524 - protein, 9 aa, synthetic construct
  source 1..9: note = Seed: VVVGAGDVG (KRAS G13D)
LVVYAQDVQ

SEQ ID NO: 91525 - protein, 9 aa, synthetic construct
  source 1..9: note = Seed: VVVGAGDVG (KRAS G13D)
LVVYAQDVS

SEQ ID NO: 91526 - protein, 9 aa, synthetic construct
  source 1..9: note = Seed: VVVGAGDVG (KRAS G13D)
LVVYAQDVV

SEQ ID NO: 91527 - protein, 9 aa, synthetic construct
  source 1..9: note = Seed: VVVGAGDVG (KRAS G13D)
LVVYAQDVY

SEQ ID NO: 91528 - protein, 9 aa, synthetic construct
  source 1..9: note = Seed: VVVGAGDVG (KRAS G13D)
LVVYARDVA

SEQ ID NO: 91529 - protein, 9 aa, synthetic construct
  source 1..9: note = Seed: VVVGAGDVG (KRAS G13D)
LVVYARDVI

SEQ ID NO: 91530 - protein, 9 aa, synthetic construct
  source 1..9: note = Seed: VVVGAGDVG (KRAS G13D)
LVVYARDVL

SEQ ID NO: 91531 - protein, 9 aa, synthetic construct
  source 1..9: note = Seed: VVVGAGDVG (KRAS G13D)
LVVYARDVV

SEQ ID NO: 91532 - protein, 9 aa, synthetic construct
  source 1..9: note = Seed: VVVGAGDVG (KRAS G13D)
LVVYASDVA

SEQ ID NO: 91533 - protein, 9 aa, synthetic construct
  source 1..9: note = Seed: VVVGAGDVG (KRAS G13D)
LVVYASDVE

SEQ ID NO: 91534 - protein, 9 aa, synthetic construct
  source 1..9: note = Seed: VVVGAGDVG (KRAS G13D)
LVVYASDVF

SEQ ID NO: 91535 - protein, 9 aa, synthetic construct
  source 1..9: note = Seed: VVVGAGDVG (KRAS G13D)
LVVYASDVG

SEQ ID NO: 91536 - protein, 9 aa, synthetic construct
  source 1..9: note = Seed: VVVGAGDVG (KRAS G13D)
LVVYASDVH

SEQ ID NO: 91537 - protein, 9 aa, synthetic construct
  source 1..9: note = Seed: VVVGAGDVG (KRAS G13D)
LVVYASDVI

SEQ ID NO: 91538 - protein, 9 aa, synthetic construct
  source 1..9: note = Seed: VVVGAGDVG (KRAS G13D)
LVVYASDVL

SEQ ID NO: 91539 - protein, 9 aa, synthetic construct
  source 1..9: note = Seed: VVVGAGDVG (KRAS G13D)
LVVYASDVM

SEQ ID NO: 91540 - protein, 9 aa, synthetic construct
  source 1..9: note = Seed: VVVGAGDVG (KRAS G13D)
LVVYASDVN

SEQ ID NO: 91541 - protein, 9 aa, synthetic construct
  source 1..9: note = Seed: VVVGAGDVG (KRAS G13D)
LVVYASDVQ

SEQ ID NO: 91542 - protein, 9 aa, synthetic construct
  source 1..9: note = Seed: VVVGAGDVG (KRAS G13D)
LVVYASDVR

SEQ ID NO: 91543 - protein, 9 aa, synthetic construct
  source 1..9: note = Seed: VVVGAGDVG (KRAS G13D)
LVVYASDVS

SEQ ID NO: 91544 - protein, 9 aa, synthetic construct
  source 1..9: note = Seed: VVVGAGDVG (KRAS G13D)
LVVYASDVT

SEQ ID NO: 91545 - protein, 9 aa, synthetic construct
  source 1..9: note = Seed: VVVGAGDVG (KRAS G13D)
LVVYASDVV

SEQ ID NO: 91546 - protein, 9 aa, synthetic construct
  source 1..9: note = Seed: VVVGAGDVG (KRAS G13D)
LVVYASDVW

SEQ ID NO: 91547 - protein, 9 aa, synthetic construct
  source 1..9: note = Seed: VVVGAGDVG (KRAS G13D)
LVVYASDVY

SEQ ID NO: 91548 - protein, 9 aa, synthetic construct
  source 1..9: note = Seed: VVVGAGDVG (KRAS G13D)
LVVYATDVA

SEQ ID NO: 91549 - protein, 9 aa, synthetic construct
  source 1..9: note = Seed: VVVGAGDVG (KRAS G13D)
LVVYATDVF

SEQ ID NO: 91550 - protein, 9 aa, synthetic construct
  source 1..9: note = Seed: VVVGAGDVG (KRAS G13D)
LVVYATDVI

SEQ ID NO: 91551 - protein, 9 aa, synthetic construct
  source 1..9: note = Seed: VVVGAGDVG (KRAS G13D)
LVVYATDVL

SEQ ID NO: 91552 - protein, 9 aa, synthetic construct
  source 1..9: note = Seed: VVVGAGDVG (KRAS G13D)
LVVYATDVM

SEQ ID NO: 91553 - protein, 9 aa, synthetic construct
  source 1..9: note = Seed: VVVGAGDVG (KRAS G13D)
LVVYATDVN

SEQ ID NO: 91554 - protein, 9 aa, synthetic construct
  source 1..9: note = Seed: VVVGAGDVG (KRAS G13D)
LVVYATDVP

SEQ ID NO: 91555 - protein, 9 aa, synthetic construct
  source 1..9: note = Seed: VVVGAGDVG (KRAS G13D)
LVVYATDVQ

SEQ ID NO: 91556 - protein, 9 aa, synthetic construct
  source 1..9: note = Seed: VVVGAGDVG (KRAS G13D)
LVVYATDVS

SEQ ID NO: 91557 - protein, 9 aa, synthetic construct
  source 1..9: note = Seed: VVVGAGDVG (KRAS G13D)
LVVYATDVT

SEQ ID NO: 91558 - protein, 9 aa, synthetic construct
  source 1..9: note = Seed: VVVGAGDVG (KRAS G13D)
LVVYATDVV

SEQ ID NO: 91559 - protein, 9 aa, synthetic construct
  source 1..9: note = Seed: VVVGAGDVG (KRAS G13D)
LVVYATDVY

SEQ ID NO: 91560 - protein, 9 aa, synthetic construct
  source 1..9: note = Seed: VVVGAGDVG (KRAS G13D)
LVVYAVDVA

SEQ ID NO: 91561 - protein, 9 aa, synthetic construct
  source 1..9: note = Seed: VVVGAGDVG (KRAS G13D)
LVVYAVDVF

SEQ ID NO: 91562 - protein, 9 aa, synthetic construct
  source 1..9: note = Seed: VVVGAGDVG (KRAS G13D)
LVVYAVDVH

SEQ ID NO: 91563 - protein, 9 aa, synthetic construct
  source 1..9: note = Seed: VVVGAGDVG (KRAS G13D)
LVVYAVDVI

SEQ ID NO: 91564 - protein, 9 aa, synthetic construct
  source 1..9: note = Seed: VVVGAGDVG (KRAS G13D)
LVVYAVDVL

SEQ ID NO: 91565 - protein, 9 aa, synthetic construct
  source 1..9: note = Seed: VVVGAGDVG (KRAS G13D)
LVVYAVDVM

SEQ ID NO: 91566 - protein, 9 aa, synthetic construct
  source 1..9: note = Seed: VVVGAGDVG (KRAS G13D)
LVVYAVDVN

SEQ ID NO: 91567 - protein, 9 aa, synthetic construct
  source 1..9: note = Seed: VVVGAGDVG (KRAS G13D)
LVVYAVDVP

SEQ ID NO: 91568 - protein, 9 aa, synthetic construct
  source 1..9: note = Seed: VVVGAGDVG (KRAS G13D)
LVVYAVDVQ

SEQ ID NO: 91569 - protein, 9 aa, synthetic construct
  source 1..9: note = Seed: VVVGAGDVG (KRAS G13D)
LVVYAVDVR

SEQ ID NO: 91570 - protein, 9 aa, synthetic construct
  source 1..9: note = Seed: VVVGAGDVG (KRAS G13D)
LVVYAVDVS

SEQ ID NO: 91571 - protein, 9 aa, synthetic construct
  source 1..9: note = Seed: VVVGAGDVG (KRAS G13D)
LVVYAVDVV

SEQ ID NO: 91572 - protein, 9 aa, synthetic construct
  source 1..9: note = Seed: VVVGAGDVG (KRAS G13D)
LVVYAVDVY

SEQ ID NO: 91573 - protein, 9 aa, synthetic construct
  source 1..9: note = Seed: VVVGAGDVG (KRAS G13D)
MVVAAADVA

SEQ ID NO: 91574 - protein, 9 aa, synthetic construct
  source 1..9: note = Seed: VVVGAGDVG (KRAS G13D)
MVVAAADVC

SEQ ID NO: 91575 - protein, 9 aa, synthetic construct
  source 1..9: note = Seed: VVVGAGDVG (KRAS G13D)
MVVAAADVD

SEQ ID NO: 91576 - protein, 9 aa, synthetic construct
  source 1..9: note = Seed: VVVGAGDVG (KRAS G13D)
MVVAAADVE

SEQ ID NO: 91577 - protein, 9 aa, synthetic construct
  source 1..9: note = Seed: VVVGAGDVG (KRAS G13D)
MVVAAADVG

SEQ ID NO: 91578 - protein, 9 aa, synthetic construct
  source 1..9: note = Seed: VVVGAGDVG (KRAS G13D)
MVVAAADVH

SEQ ID NO: 91579 - protein, 9 aa, synthetic construct
  source 1..9: note = Seed: VVVGAGDVG (KRAS G13D)
MVVAAADVI

SEQ ID NO: 91580 - protein, 9 aa, synthetic construct
  source 1..9: note = Seed: VVVGAGDVG (KRAS G13D)
MVVAAADVL

SEQ ID NO: 91581 - protein, 9 aa, synthetic construct
  source 1..9: note = Seed: VVVGAGDVG (KRAS G13D)
MVVAAADVM

SEQ ID NO: 91582 - protein, 9 aa, synthetic construct
  source 1..9: note = Seed: VVVGAGDVG (KRAS G13D)
MVVAAADVN

SEQ ID NO: 91583 - protein, 9 aa, synthetic construct
  source 1..9: note = Seed: VVVGAGDVG (KRAS G13D)
MVVAAADVQ

SEQ ID NO: 91584 - protein, 9 aa, synthetic construct
  source 1..9: note = Seed: VVVGAGDVG (KRAS G13D)
MVVAAADVS

SEQ ID NO: 91585 - protein, 9 aa, synthetic construct
  source 1..9: note = Seed: VVVGAGDVG (KRAS G13D)
MVVAAADVT

SEQ ID NO: 91586 - protein, 9 aa, synthetic construct
  source 1..9: note = Seed: VVVGAGDVG (KRAS G13D)
MVVAAADVV

SEQ ID NO: 91587 - protein, 9 aa, synthetic construct
  source 1..9: note = Seed: VVVGAGDVG (KRAS G13D)
MVVAACDVA

SEQ ID NO: 91588 - protein, 9 aa, synthetic construct
  source 1..9: note = Seed: VVVGAGDVG (KRAS G13D)
MVVAADDVA

SEQ ID NO: 91589 - protein, 9 aa, synthetic construct
  source 1..9: note = Seed: VVVGAGDVG (KRAS G13D)
MVVAADDVF

SEQ ID NO: 91590 - protein, 9 aa, synthetic construct
  source 1..9: note = Seed: VVVGAGDVG (KRAS G13D)
MVVAADDVG

SEQ ID NO: 91591 - protein, 9 aa, synthetic construct
  source 1..9: note = Seed: VVVGAGDVG (KRAS G13D)
MVVAADDVI

SEQ ID NO: 91592 - protein, 9 aa, synthetic construct
  source 1..9: note = Seed: VVVGAGDVG (KRAS G13D)
MVVAADDVL

SEQ ID NO: 91593 - protein, 9 aa, synthetic construct
  source 1..9: note = Seed: VVVGAGDVG (KRAS G13D)
MVVAADDVM

SEQ ID NO: 91594 - protein, 9 aa, synthetic construct
  source 1..9: note = Seed: VVVGAGDVG (KRAS G13D)
MVVAADDVN

SEQ ID NO: 91595 - protein, 9 aa, synthetic construct
  source 1..9: note = Seed: VVVGAGDVG (KRAS G13D)
MVVAADDVQ

SEQ ID NO: 91596 - protein, 9 aa, synthetic construct
  source 1..9: note = Seed: VVVGAGDVG (KRAS G13D)
MVVAADDVS

SEQ ID NO: 91597 - protein, 9 aa, synthetic construct
  source 1..9: note = Seed: VVVGAGDVG (KRAS G13D)
MVVAADDVT

SEQ ID NO: 91598 - protein, 9 aa, synthetic construct
  source 1..9: note = Seed: VVVGAGDVG (KRAS G13D)
MVVAADDVV

SEQ ID NO: 91599 - protein, 9 aa, synthetic construct
  source 1..9: note = Seed: VVVGAGDVG (KRAS G13D)
MVVAAEDVG

SEQ ID NO: 91600 - protein, 9 aa, synthetic construct
  source 1..9: note = Seed: VVVGAGDVG (KRAS G13D)
MVVAAEDVS

SEQ ID NO: 91601 - protein, 9 aa, synthetic construct
  source 1..9: note = Seed: VVVGAGDVG (KRAS G13D)
MVVAAGDVA

SEQ ID NO: 91602 - protein, 9 aa, synthetic construct
  source 1..9: note = Seed: VVVGAGDVG (KRAS G13D)
MVVAAGDVD

SEQ ID NO: 91603 - protein, 9 aa, synthetic construct
  source 1..9: note = Seed: VVVGAGDVG (KRAS G13D)
MVVAAGDVE

SEQ ID NO: 91604 - protein, 9 aa, synthetic construct
  source 1..9: note = Seed: VVVGAGDVG (KRAS G13D)
MVVAAGDVG

SEQ ID NO: 91605 - protein, 9 aa, synthetic construct
  source 1..9: note = Seed: VVVGAGDVG (KRAS G13D)
MVVAAGDVH

SEQ ID NO: 91606 - protein, 9 aa, synthetic construct
  source 1..9: note = Seed: VVVGAGDVG (KRAS G13D)
MVVAAGDVI

SEQ ID NO: 91607 - protein, 9 aa, synthetic construct
  source 1..9: note = Seed: VVVGAGDVG (KRAS G13D)
MVVAAGDVL

SEQ ID NO: 91608 - protein, 9 aa, synthetic construct
  source 1..9: note = Seed: VVVGAGDVG (KRAS G13D)
MVVAAGDVM

SEQ ID NO: 91609 - protein, 9 aa, synthetic construct
  source 1..9: note = Seed: VVVGAGDVG (KRAS G13D)
MVVAAGDVN

SEQ ID NO: 91610 - protein, 9 aa, synthetic construct
  source 1..9: note = Seed: VVVGAGDVG (KRAS G13D)
MVVAAGDVQ

SEQ ID NO: 91611 - protein, 9 aa, synthetic construct
  source 1..9: note = Seed: VVVGAGDVG (KRAS G13D)
MVVAAGDVS

SEQ ID NO: 91612 - protein, 9 aa, synthetic construct
  source 1..9: note = Seed: VVVGAGDVG (KRAS G13D)
MVVAAGDVT

SEQ ID NO: 91613 - protein, 9 aa, synthetic construct
  source 1..9: note = Seed: VVVGAGDVG (KRAS G13D)
MVVAAGDVV

SEQ ID NO: 91614 - protein, 9 aa, synthetic construct
  source 1..9: note = Seed: VVVGAGDVG (KRAS G13D)
MVVAAHDVC

SEQ ID NO: 91615 - protein, 9 aa, synthetic construct
  source 1..9: note = Seed: VVVGAGDVG (KRAS G13D)
MVVAAIDVA

SEQ ID NO: 91616 - protein, 9 aa, synthetic construct
  source 1..9: note = Seed: VVVGAGDVG (KRAS G13D)
MVVAAIDVC

SEQ ID NO: 91617 - protein, 9 aa, synthetic construct
  source 1..9: note = Seed: VVVGAGDVG (KRAS G13D)
MVVAAIDVG

SEQ ID NO: 91618 - protein, 9 aa, synthetic construct
  source 1..9: note = Seed: VVVGAGDVG (KRAS G13D)
MVVAAIDVM

SEQ ID NO: 91619 - protein, 9 aa, synthetic construct
  source 1..9: note = Seed: VVVGAGDVG (KRAS G13D)
MVVAAIDVN

SEQ ID NO: 91620 - protein, 9 aa, synthetic construct
  source 1..9: note = Seed: VVVGAGDVG (KRAS G13D)
MVVAAIDVS

SEQ ID NO: 91621 - protein, 9 aa, synthetic construct
  source 1..9: note = Seed: VVVGAGDVG (KRAS G13D)
MVVAAIDVT

SEQ ID NO: 91622 - protein, 9 aa, synthetic construct
  source 1..9: note = Seed: VVVGAGDVG (KRAS G13D)
MVVAAIDVV

SEQ ID NO: 91623 - protein, 9 aa, synthetic construct
  source 1..9: note = Seed: VVVGAGDVG (KRAS G13D)
MVVAAKDVA

SEQ ID NO: 91624 - protein, 9 aa, synthetic construct
  source 1..9: note = Seed: VVVGAGDVG (KRAS G13D)
MVVAALDVA

SEQ ID NO: 91625 - protein, 9 aa, synthetic construct
  source 1..9: note = Seed: VVVGAGDVG (KRAS G13D)
MVVAALDVL

SEQ ID NO: 91626 - protein, 9 aa, synthetic construct
  source 1..9: note = Seed: VVVGAGDVG (KRAS G13D)
MVVAALDVM

SEQ ID NO: 91627 - protein, 9 aa, synthetic construct
  source 1..9: note = Seed: VVVGAGDVG (KRAS G13D)
MVVAALDVS

SEQ ID NO: 91628 - protein, 9 aa, synthetic construct
  source 1..9: note = Seed: VVVGAGDVG (KRAS G13D)
MVVAALDVV

SEQ ID NO: 91629 - protein, 9 aa, synthetic construct
  source 1..9: note = Seed: VVVGAGDVG (KRAS G13D)
MVVAANDVA

SEQ ID NO: 91630 - protein, 9 aa, synthetic construct
  source 1..9: note = Seed: VVVGAGDVG (KRAS G13D)
MVVAANDVC

SEQ ID NO: 91631 - protein, 9 aa, synthetic construct
  source 1..9: note = Seed: VVVGAGDVG (KRAS G13D)
MVVAANDVD

SEQ ID NO: 91632 - protein, 9 aa, synthetic construct
  source 1..9: note = Seed: VVVGAGDVG (KRAS G13D)
MVVAANDVE

SEQ ID NO: 91633 - protein, 9 aa, synthetic construct
  source 1..9: note = Seed: VVVGAGDVG (KRAS G13D)
MVVAANDVF

SEQ ID NO: 91634 - protein, 9 aa, synthetic construct
  source 1..9: note = Seed: VVVGAGDVG (KRAS G13D)
MVVAANDVG

SEQ ID NO: 91635 - protein, 9 aa, synthetic construct
  source 1..9: note = Seed: VVVGAGDVG (KRAS G13D)
MVVAANDVH

SEQ ID NO: 91636 - protein, 9 aa, synthetic construct
  source 1..9: note = Seed: VVVGAGDVG (KRAS G13D)
MVVAANDVI

SEQ ID NO: 91637 - protein, 9 aa, synthetic construct
  source 1..9: note = Seed: VVVGAGDVG (KRAS G13D)
MVVAANDVK

SEQ ID NO: 91638 - protein, 9 aa, synthetic construct
  source 1..9: note = Seed: VVVGAGDVG (KRAS G13D)
MVVAANDVL

SEQ ID NO: 91639 - protein, 9 aa, synthetic construct
  source 1..9: note = Seed: VVVGAGDVG (KRAS G13D)
MVVAANDVM

SEQ ID NO: 91640 - protein, 9 aa, synthetic construct
  source 1..9: note = Seed: VVVGAGDVG (KRAS G13D)
MVVAANDVN

SEQ ID NO: 91641 - protein, 9 aa, synthetic construct
  source 1..9: note = Seed: VVVGAGDVG (KRAS G13D)
MVVAANDVP

SEQ ID NO: 91642 - protein, 9 aa, synthetic construct
  source 1..9: note = Seed: VVVGAGDVG (KRAS G13D)
MVVAANDVQ

SEQ ID NO: 91643 - protein, 9 aa, synthetic construct
  source 1..9: note = Seed: VVVGAGDVG (KRAS G13D)
MVVAANDVR

SEQ ID NO: 91644 - protein, 9 aa, synthetic construct
  source 1..9: note = Seed: VVVGAGDVG (KRAS G13D)
MVVAANDVS

SEQ ID NO: 91645 - protein, 9 aa, synthetic construct
  source 1..9: note = Seed: VVVGAGDVG (KRAS G13D)
MVVAANDVT

SEQ ID NO: 91646 - protein, 9 aa, synthetic construct
  source 1..9: note = Seed: VVVGAGDVG (KRAS G13D)
MVVAANDVV

SEQ ID NO: 91647 - protein, 9 aa, synthetic construct
  source 1..9: note = Seed: VVVGAGDVG (KRAS G13D)
MVVAANDVY

SEQ ID NO: 91648 - protein, 9 aa, synthetic construct
  source 1..9: note = Seed: VVVGAGDVG (KRAS G13D)
MVVAAPDVA

SEQ ID NO: 91649 - protein, 9 aa, synthetic construct
  source 1..9: note = Seed: VVVGAGDVG (KRAS G13D)
MVVAAPDVC

SEQ ID NO: 91650 - protein, 9 aa, synthetic construct
  source 1..9: note = Seed: VVVGAGDVG (KRAS G13D)
MVVAAPDVD

SEQ ID NO: 91651 - protein, 9 aa, synthetic construct
  source 1..9: note = Seed: VVVGAGDVG (KRAS G13D)
MVVAAPDVE

SEQ ID NO: 91652 - protein, 9 aa, synthetic construct
  source 1..9: note = Seed: VVVGAGDVG (KRAS G13D)
MVVAAPDVG

SEQ ID NO: 91653 - protein, 9 aa, synthetic construct
  source 1..9: note = Seed: VVVGAGDVG (KRAS G13D)
MVVAAPDVH

SEQ ID NO: 91654 - protein, 9 aa, synthetic construct
  source 1..9: note = Seed: VVVGAGDVG (KRAS G13D)
MVVAAPDVI

SEQ ID NO: 91655 - protein, 9 aa, synthetic construct
  source 1..9: note = Seed: VVVGAGDVG (KRAS G13D)
MVVAAPDVL

SEQ ID NO: 91656 - protein, 9 aa, synthetic construct
  source 1..9: note = Seed: VVVGAGDVG (KRAS G13D)
MVVAAPDVM

SEQ ID NO: 91657 - protein, 9 aa, synthetic construct
  source 1..9: note = Seed: VVVGAGDVG (KRAS G13D)
MVVAAPDVN

SEQ ID NO: 91658 - protein, 9 aa, synthetic construct
  source 1..9: note = Seed: VVVGAGDVG (KRAS G13D)
MVVAAPDVP

SEQ ID NO: 91659 - protein, 9 aa, synthetic construct
  source 1..9: note = Seed: VVVGAGDVG (KRAS G13D)
MVVAAPDVQ

SEQ ID NO: 91660 - protein, 9 aa, synthetic construct
  source 1..9: note = Seed: VVVGAGDVG (KRAS G13D)
MVVAAPDVS

SEQ ID NO: 91661 - protein, 9 aa, synthetic construct
  source 1..9: note = Seed: VVVGAGDVG (KRAS G13D)
MVVAAPDVT

SEQ ID NO: 91662 - protein, 9 aa, synthetic construct
  source 1..9: note = Seed: VVVGAGDVG (KRAS G13D)
MVVAAPDVV

SEQ ID NO: 91663 - protein, 9 aa, synthetic construct
  source 1..9: note = Seed: VVVGAGDVG (KRAS G13D)
MVVAASDVA

SEQ ID NO: 91664 - protein, 9 aa, synthetic construct
  source 1..9: note = Seed: VVVGAGDVG (KRAS G13D)
MVVAASDVC

SEQ ID NO: 91665 - protein, 9 aa, synthetic construct
  source 1..9: note = Seed: VVVGAGDVG (KRAS G13D)
MVVAASDVD

SEQ ID NO: 91666 - protein, 9 aa, synthetic construct
  source 1..9: note = Seed: VVVGAGDVG (KRAS G13D)
MVVAASDVE

SEQ ID NO: 91667 - protein, 9 aa, synthetic construct
  source 1..9: note = Seed: VVVGAGDVG (KRAS G13D)
MVVAASDVG

SEQ ID NO: 91668 - protein, 9 aa, synthetic construct
  source 1..9: note = Seed: VVVGAGDVG (KRAS G13D)
MVVAASDVH

SEQ ID NO: 91669 - protein, 9 aa, synthetic construct
  source 1..9: note = Seed: VVVGAGDVG (KRAS G13D)
MVVAASDVI

SEQ ID NO: 91670 - protein, 9 aa, synthetic construct
  source 1..9: note = Seed: VVVGAGDVG (KRAS G13D)
MVVAASDVL

SEQ ID NO: 91671 - protein, 9 aa, synthetic construct
  source 1..9: note = Seed: VVVGAGDVG (KRAS G13D)
MVVAASDVM

SEQ ID NO: 91672 - protein, 9 aa, synthetic construct
  source 1..9: note = Seed: VVVGAGDVG (KRAS G13D)
MVVAASDVN

SEQ ID NO: 91673 - protein, 9 aa, synthetic construct
  source 1..9: note = Seed: VVVGAGDVG (KRAS G13D)
MVVAASDVQ

SEQ ID NO: 91674 - protein, 9 aa, synthetic construct
  source 1..9: note = Seed: VVVGAGDVG (KRAS G13D)
MVVAASDVS

SEQ ID NO: 91675 - protein, 9 aa, synthetic construct
  source 1..9: note = Seed: VVVGAGDVG (KRAS G13D)
MVVAASDVT

SEQ ID NO: 91676 - protein, 9 aa, synthetic construct
  source 1..9: note = Seed: VVVGAGDVG (KRAS G13D)
MVVAASDVV

SEQ ID NO: 91677 - protein, 9 aa, synthetic construct
  source 1..9: note = Seed: VVVGAGDVG (KRAS G13D)
MVVAATDVA

SEQ ID NO: 91678 - protein, 9 aa, synthetic construct
  source 1..9: note = Seed: VVVGAGDVG (KRAS G13D)
MVVAATDVC

SEQ ID NO: 91679 - protein, 9 aa, synthetic construct
  source 1..9: note = Seed: VVVGAGDVG (KRAS G13D)
MVVAATDVD

SEQ ID NO: 91680 - protein, 9 aa, synthetic construct
  source 1..9: note = Seed: VVVGAGDVG (KRAS G13D)
MVVAATDVE

SEQ ID NO: 91681 - protein, 9 aa, synthetic construct
  source 1..9: note = Seed: VVVGAGDVG (KRAS G13D)
MVVAATDVF

SEQ ID NO: 91682 - protein, 9 aa, synthetic construct
  source 1..9: note = Seed: VVVGAGDVG (KRAS G13D)
MVVAATDVG

SEQ ID NO: 91683 - protein, 9 aa, synthetic construct
  source 1..9: note = Seed: VVVGAGDVG (KRAS G13D)
MVVAATDVH

SEQ ID NO: 91684 - protein, 9 aa, synthetic construct
  source 1..9: note = Seed: VVVGAGDVG (KRAS G13D)
MVVAATDVI

SEQ ID NO: 91685 - protein, 9 aa, synthetic construct
  source 1..9: note = Seed: VVVGAGDVG (KRAS G13D)
MVVAATDVK

SEQ ID NO: 91686 - protein, 9 aa, synthetic construct
  source 1..9: note = Seed: VVVGAGDVG (KRAS G13D)
MVVAATDVL

SEQ ID NO: 91687 - protein, 9 aa, synthetic construct
  source 1..9: note = Seed: VVVGAGDVG (KRAS G13D)
MVVAATDVM

SEQ ID NO: 91688 - protein, 9 aa, synthetic construct
  source 1..9: note = Seed: VVVGAGDVG (KRAS G13D)
MVVAATDVN

SEQ ID NO: 91689 - protein, 9 aa, synthetic construct
  source 1..9: note = Seed: VVVGAGDVG (KRAS G13D)
MVVAATDVP

SEQ ID NO: 91690 - protein, 9 aa, synthetic construct
  source 1..9: note = Seed: VVVGAGDVG (KRAS G13D)
MVVAATDVQ

SEQ ID NO: 91691 - protein, 9 aa, synthetic construct
  source 1..9: note = Seed: VVVGAGDVG (KRAS G13D)
MVVAATDVR

SEQ ID NO: 91692 - protein, 9 aa, synthetic construct
  source 1..9: note = Seed: VVVGAGDVG (KRAS G13D)
MVVAATDVS

SEQ ID NO: 91693 - protein, 9 aa, synthetic construct
  source 1..9: note = Seed: VVVGAGDVG (KRAS G13D)
MVVAATDVT

SEQ ID NO: 91694 - protein, 9 aa, synthetic construct
  source 1..9: note = Seed: VVVGAGDVG (KRAS G13D)
MVVAATDVV

SEQ ID NO: 91695 - protein, 9 aa, synthetic construct
  source 1..9: note = Seed: VVVGAGDVG (KRAS G13D)
MVVAATDVY

SEQ ID NO: 91696 - protein, 9 aa, synthetic construct
  source 1..9: note = Seed: VVVGAGDVG (KRAS G13D)
MVVAAVDVA

SEQ ID NO: 91697 - protein, 9 aa, synthetic construct
  source 1..9: note = Seed: VVVGAGDVG (KRAS G13D)
MVVAAVDVD

SEQ ID NO: 91698 - protein, 9 aa, synthetic construct
  source 1..9: note = Seed: VVVGAGDVG (KRAS G13D)
MVVAAVDVG

SEQ ID NO: 91699 - protein, 9 aa, synthetic construct
  source 1..9: note = Seed: VVVGAGDVG (KRAS G13D)
MVVAAVDVH

SEQ ID NO: 91700 - protein, 9 aa, synthetic construct
  source 1..9: note = Seed: VVVGAGDVG (KRAS G13D)
MVVAAVDVI

SEQ ID NO: 91701 - protein, 9 aa, synthetic construct
  source 1..9: note = Seed: VVVGAGDVG (KRAS G13D)
MVVAAVDVL

SEQ ID NO: 91702 - protein, 9 aa, synthetic construct
  source 1..9: note = Seed: VVVGAGDVG (KRAS G13D)
MVVAAVDVM

SEQ ID NO: 91703 - protein, 9 aa, synthetic construct
  source 1..9: note = Seed: VVVGAGDVG (KRAS G13D)
MVVAAVDVN

SEQ ID NO: 91704 - protein, 9 aa, synthetic construct
  source 1..9: note = Seed: VVVGAGDVG (KRAS G13D)
MVVAAVDVQ

SEQ ID NO: 91705 - protein, 9 aa, synthetic construct
  source 1..9: note = Seed: VVVGAGDVG (KRAS G13D)
MVVAAVDVS

SEQ ID NO: 91706 - protein, 9 aa, synthetic construct
  source 1..9: note = Seed: VVVGAGDVG (KRAS G13D)
MVVAAVDVT

SEQ ID NO: 91707 - protein, 9 aa, synthetic construct
  source 1..9: note = Seed: VVVGAGDVG (KRAS G13D)
MVVAAVDVV

SEQ ID NO: 91708 - protein, 9 aa, synthetic construct
  source 1..9: note = Seed: VVVGAGDVG (KRAS G13D)
MVVAAYDVN

SEQ ID NO: 91709 - protein, 9 aa, synthetic construct
  source 1..9: note = Seed: VVVGAGDVG (KRAS G13D)
MVVAAYDVS

SEQ ID NO: 91710 - protein, 9 aa, synthetic construct
  source 1..9: note = Seed: VVVGAGDVG (KRAS G13D)
MVVCAADVA

SEQ ID NO: 91711 - protein, 9 aa, synthetic construct
  source 1..9: note = Seed: VVVGAGDVG (KRAS G13D)
MVVCAADVM

SEQ ID NO: 91712 - protein, 9 aa, synthetic construct
  source 1..9: note = Seed: VVVGAGDVG (KRAS G13D)
MVVCAADVN

SEQ ID NO: 91713 - protein, 9 aa, synthetic construct
  source 1..9: note = Seed: VVVGAGDVG (KRAS G13D)
MVVCAADVQ

SEQ ID NO: 91714 - protein, 9 aa, synthetic construct
  source 1..9: note = Seed: VVVGAGDVG (KRAS G13D)
MVVCAADVS

SEQ ID NO: 91715 - protein, 9 aa, synthetic construct
  source 1..9: note = Seed: VVVGAGDVG (KRAS G13D)
MVVCAIDVA

SEQ ID NO: 91716 - protein, 9 aa, synthetic construct
  source 1..9: note = Seed: VVVGAGDVG (KRAS G13D)
MVVCALDVA

SEQ ID NO: 91717 - protein, 9 aa, synthetic construct
  source 1..9: note = Seed: VVVGAGDVG (KRAS G13D)
MVVCANDVA

SEQ ID NO: 91718 - protein, 9 aa, synthetic construct
  source 1..9: note = Seed: VVVGAGDVG (KRAS G13D)
MVVCANDVH

SEQ ID NO: 91719 - protein, 9 aa, synthetic construct
  source 1..9: note = Seed: VVVGAGDVG (KRAS G13D)
MVVCANDVN

SEQ ID NO: 91720 - protein, 9 aa, synthetic construct
  source 1..9: note = Seed: VVVGAGDVG (KRAS G13D)
MVVCANDVQ

SEQ ID NO: 91721 - protein, 9 aa, synthetic construct
  source 1..9: note = Seed: VVVGAGDVG (KRAS G13D)
MVVCANDVS

SEQ ID NO: 91722 - protein, 9 aa, synthetic construct
  source 1..9: note = Seed: VVVGAGDVG (KRAS G13D)
MVVCASDVA

SEQ ID NO: 91723 - protein, 9 aa, synthetic construct
  source 1..9: note = Seed: VVVGAGDVG (KRAS G13D)
MVVCATDVA

SEQ ID NO: 91724 - protein, 9 aa, synthetic construct
  source 1..9: note = Seed: VVVGAGDVG (KRAS G13D)
MVVDAADVA

SEQ ID NO: 91725 - protein, 9 aa, synthetic construct
  source 1..9: note = Seed: VVVGAGDVG (KRAS G13D)
MVVDAADVG

SEQ ID NO: 91726 - protein, 9 aa, synthetic construct
  source 1..9: note = Seed: VVVGAGDVG (KRAS G13D)
MVVDAADVL

SEQ ID NO: 91727 - protein, 9 aa, synthetic construct
  source 1..9: note = Seed: VVVGAGDVG (KRAS G13D)
MVVDAADVN

SEQ ID NO: 91728 - protein, 9 aa, synthetic construct
  source 1..9: note = Seed: VVVGAGDVG (KRAS G13D)
MVVDAADVQ

SEQ ID NO: 91729 - protein, 9 aa, synthetic construct
  source 1..9: note = Seed: VVVGAGDVG (KRAS G13D)
MVVDAADVS

SEQ ID NO: 91730 - protein, 9 aa, synthetic construct
  source 1..9: note = Seed: VVVGAGDVG (KRAS G13D)
MVVDAADVT

SEQ ID NO: 91731 - protein, 9 aa, synthetic construct
  source 1..9: note = Seed: VVVGAGDVG (KRAS G13D)
MVVDAIDVS

SEQ ID NO: 91732 - protein, 9 aa, synthetic construct
  source 1..9: note = Seed: VVVGAGDVG (KRAS G13D)
MVVDALDVV

SEQ ID NO: 91733 - protein, 9 aa, synthetic construct
  source 1..9: note = Seed: VVVGAGDVG (KRAS G13D)
MVVDANDVA

SEQ ID NO: 91734 - protein, 9 aa, synthetic construct
  source 1..9: note = Seed: VVVGAGDVG (KRAS G13D)
MVVDASDVA

SEQ ID NO: 91735 - protein, 9 aa, synthetic construct
  source 1..9: note = Seed: VVVGAGDVG (KRAS G13D)
MVVDASDVQ

SEQ ID NO: 91736 - protein, 9 aa, synthetic construct
  source 1..9: note = Seed: VVVGAGDVG (KRAS G13D)
MVVDASDVS

SEQ ID NO: 91737 - protein, 9 aa, synthetic construct
  source 1..9: note = Seed: VVVGAGDVG (KRAS G13D)
MVVDATDVA

SEQ ID NO: 91738 - protein, 9 aa, synthetic construct
  source 1..9: note = Seed: VVVGAGDVG (KRAS G13D)
MVVDAVDVA

SEQ ID NO: 91739 - protein, 9 aa, synthetic construct
  source 1..9: note = Seed: VVVGAGDVG (KRAS G13D)
MVVDAVDVN

SEQ ID NO: 91740 - protein, 9 aa, synthetic construct
  source 1..9: note = Seed: VVVGAGDVG (KRAS G13D)
MVVDAVDVQ

SEQ ID NO: 91741 - protein, 9 aa, synthetic construct
  source 1..9: note = Seed: VVVGAGDVG (KRAS G13D)
MVVDAVDVS

SEQ ID NO: 91742 - protein, 9 aa, synthetic construct
  source 1..9: note = Seed: VVVGAGDVG (KRAS G13D)
MVVEAADVA

SEQ ID NO: 91743 - protein, 9 aa, synthetic construct
  source 1..9: note = Seed: VVVGAGDVG (KRAS G13D)
MVVEAADVC

SEQ ID NO: 91744 - protein, 9 aa, synthetic construct
  source 1..9: note = Seed: VVVGAGDVG (KRAS G13D)
MVVEAADVD

SEQ ID NO: 91745 - protein, 9 aa, synthetic construct
  source 1..9: note = Seed: VVVGAGDVG (KRAS G13D)
MVVEAADVE

SEQ ID NO: 91746 - protein, 9 aa, synthetic construct
  source 1..9: note = Seed: VVVGAGDVG (KRAS G13D)
MVVEAADVG

SEQ ID NO: 91747 - protein, 9 aa, synthetic construct
  source 1..9: note = Seed: VVVGAGDVG (KRAS G13D)
MVVEAADVH

SEQ ID NO: 91748 - protein, 9 aa, synthetic construct
  source 1..9: note = Seed: VVVGAGDVG (KRAS G13D)
MVVEAADVI

SEQ ID NO: 91749 - protein, 9 aa, synthetic construct
  source 1..9: note = Seed: VVVGAGDVG (KRAS G13D)
MVVEAADVL

SEQ ID NO: 91750 - protein, 9 aa, synthetic construct
  source 1..9: note = Seed: VVVGAGDVG (KRAS G13D)
MVVEAADVM

SEQ ID NO: 91751 - protein, 9 aa, synthetic construct
  source 1..9: note = Seed: VVVGAGDVG (KRAS G13D)
MVVEAADVN

SEQ ID NO: 91752 - protein, 9 aa, synthetic construct
  source 1..9: note = Seed: VVVGAGDVG (KRAS G13D)
MVVEAADVQ

SEQ ID NO: 91753 - protein, 9 aa, synthetic construct
  source 1..9: note = Seed: VVVGAGDVG (KRAS G13D)
MVVEAADVS

SEQ ID NO: 91754 - protein, 9 aa, synthetic construct
  source 1..9: note = Seed: VVVGAGDVG (KRAS G13D)
MVVEAADVT

SEQ ID NO: 91755 - protein, 9 aa, synthetic construct
  source 1..9: note = Seed: VVVGAGDVG (KRAS G13D)
MVVEAADVV

SEQ ID NO: 91756 - protein, 9 aa, synthetic construct
  source 1..9: note = Seed: VVVGAGDVG (KRAS G13D)
MVVEAGDVA

SEQ ID NO: 91757 - protein, 9 aa, synthetic construct
  source 1..9: note = Seed: VVVGAGDVG (KRAS G13D)
MVVEAIDVS

SEQ ID NO: 91758 - protein, 9 aa, synthetic construct
  source 1..9: note = Seed: VVVGAGDVG (KRAS G13D)
MVVEALDVL

SEQ ID NO: 91759 - protein, 9 aa, synthetic construct
  source 1..9: note = Seed: VVVGAGDVG (KRAS G13D)
MVVEALDVV

SEQ ID NO: 91760 - protein, 9 aa, synthetic construct
  source 1..9: note = Seed: VVVGAGDVG (KRAS G13D)
MVVEANDVA

SEQ ID NO: 91761 - protein, 9 aa, synthetic construct
  source 1..9: note = Seed: VVVGAGDVG (KRAS G13D)
MVVEANDVC

SEQ ID NO: 91762 - protein, 9 aa, synthetic construct
  source 1..9: note = Seed: VVVGAGDVG (KRAS G13D)
MVVEANDVG

SEQ ID NO: 91763 - protein, 9 aa, synthetic construct
  source 1..9: note = Seed: VVVGAGDVG (KRAS G13D)
MVVEANDVI

SEQ ID NO: 91764 - protein, 9 aa, synthetic construct
  source 1..9: note = Seed: VVVGAGDVG (KRAS G13D)
MVVEANDVL

SEQ ID NO: 91765 - protein, 9 aa, synthetic construct
  source 1..9: note = Seed: VVVGAGDVG (KRAS G13D)
MVVEANDVM

SEQ ID NO: 91766 - protein, 9 aa, synthetic construct
  source 1..9: note = Seed: VVVGAGDVG (KRAS G13D)
MVVEANDVN

SEQ ID NO: 91767 - protein, 9 aa, synthetic construct
  source 1..9: note = Seed: VVVGAGDVG (KRAS G13D)
MVVEANDVQ

SEQ ID NO: 91768 - protein, 9 aa, synthetic construct
  source 1..9: note = Seed: VVVGAGDVG (KRAS G13D)
MVVEANDVS

SEQ ID NO: 91769 - protein, 9 aa, synthetic construct
  source 1..9: note = Seed: VVVGAGDVG (KRAS G13D)
MVVEANDVT

SEQ ID NO: 91770 - protein, 9 aa, synthetic construct
  source 1..9: note = Seed: VVVGAGDVG (KRAS G13D)
MVVEANDVV

SEQ ID NO: 91771 - protein, 9 aa, synthetic construct
  source 1..9: note = Seed: VVVGAGDVG (KRAS G13D)
MVVEAPDVA

SEQ ID NO: 91772 - protein, 9 aa, synthetic construct
  source 1..9: note = Seed: VVVGAGDVG (KRAS G13D)
MVVEASDVA

SEQ ID NO: 91773 - protein, 9 aa, synthetic construct
  source 1..9: note = Seed: VVVGAGDVG (KRAS G13D)
MVVEASDVD

SEQ ID NO: 91774 - protein, 9 aa, synthetic construct
  source 1..9: note = Seed: VVVGAGDVG (KRAS G13D)
MVVEASDVE

SEQ ID NO: 91775 - protein, 9 aa, synthetic construct
  source 1..9: note = Seed: VVVGAGDVG (KRAS G13D)
MVVEASDVG

SEQ ID NO: 91776 - protein, 9 aa, synthetic construct
  source 1..9: note = Seed: VVVGAGDVG (KRAS G13D)
MVVEASDVH

SEQ ID NO: 91777 - protein, 9 aa, synthetic construct
  source 1..9: note = Seed: VVVGAGDVG (KRAS G13D)
MVVEASDVI

SEQ ID NO: 91778 - protein, 9 aa, synthetic construct
  source 1..9: note = Seed: VVVGAGDVG (KRAS G13D)
MVVEASDVL

SEQ ID NO: 91779 - protein, 9 aa, synthetic construct
  source 1..9: note = Seed: VVVGAGDVG (KRAS G13D)
MVVEASDVM

SEQ ID NO: 91780 - protein, 9 aa, synthetic construct
  source 1..9: note = Seed: VVVGAGDVG (KRAS G13D)
MVVEASDVN

SEQ ID NO: 91781 - protein, 9 aa, synthetic construct
  source 1..9: note = Seed: VVVGAGDVG (KRAS G13D)
MVVEASDVQ

SEQ ID NO: 91782 - protein, 9 aa, synthetic construct
  source 1..9: note = Seed: VVVGAGDVG (KRAS G13D)
MVVEASDVS

SEQ ID NO: 91783 - protein, 9 aa, synthetic construct
  source 1..9: note = Seed: VVVGAGDVG (KRAS G13D)
MVVEASDVT

SEQ ID NO: 91784 - protein, 9 aa, synthetic construct
  source 1..9: note = Seed: VVVGAGDVG (KRAS G13D)
MVVEASDVV

SEQ ID NO: 91785 - protein, 9 aa, synthetic construct
  source 1..9: note = Seed: VVVGAGDVG (KRAS G13D)
MVVEATDVA

SEQ ID NO: 91786 - protein, 9 aa, synthetic construct
  source 1..9: note = Seed: VVVGAGDVG (KRAS G13D)
MVVEATDVD

SEQ ID NO: 91787 - protein, 9 aa, synthetic construct
  source 1..9: note = Seed: VVVGAGDVG (KRAS G13D)
MVVEATDVE

SEQ ID NO: 91788 - protein, 9 aa, synthetic construct
  source 1..9: note = Seed: VVVGAGDVG (KRAS G13D)
MVVEATDVG

SEQ ID NO: 91789 - protein, 9 aa, synthetic construct
  source 1..9: note = Seed: VVVGAGDVG (KRAS G13D)
MVVEATDVH

SEQ ID NO: 91790 - protein, 9 aa, synthetic construct
  source 1..9: note = Seed: VVVGAGDVG (KRAS G13D)
MVVEATDVI

SEQ ID NO: 91791 - protein, 9 aa, synthetic construct
  source 1..9: note = Seed: VVVGAGDVG (KRAS G13D)
MVVEATDVL

SEQ ID NO: 91792 - protein, 9 aa, synthetic construct
  source 1..9: note = Seed: VVVGAGDVG (KRAS G13D)
MVVEATDVM

SEQ ID NO: 91793 - protein, 9 aa, synthetic construct
  source 1..9: note = Seed: VVVGAGDVG (KRAS G13D)
MVVEATDVN

SEQ ID NO: 91794 - protein, 9 aa, synthetic construct
  source 1..9: note = Seed: VVVGAGDVG (KRAS G13D)
MVVEATDVQ

SEQ ID NO: 91795 - protein, 9 aa, synthetic construct
  source 1..9: note = Seed: VVVGAGDVG (KRAS G13D)
MVVEATDVS

SEQ ID NO: 91796 - protein, 9 aa, synthetic construct
  source 1..9: note = Seed: VVVGAGDVG (KRAS G13D)
MVVEATDVT

SEQ ID NO: 91797 - protein, 9 aa, synthetic construct
  source 1..9: note = Seed: VVVGAGDVG (KRAS G13D)
MVVEATDVV

SEQ ID NO: 91798 - protein, 9 aa, synthetic construct
  source 1..9: note = Seed: VVVGAGDVG (KRAS G13D)
MVVEATDVY

SEQ ID NO: 91799 - protein, 9 aa, synthetic construct
  source 1..9: note = Seed: VVVGAGDVG (KRAS G13D)
MVVEAVDVA

SEQ ID NO: 91800 - protein, 9 aa, synthetic construct
  source 1..9: note = Seed: VVVGAGDVG (KRAS G13D)
MVVEAVDVM

SEQ ID NO: 91801 - protein, 9 aa, synthetic construct
  source 1..9: note = Seed: VVVGAGDVG (KRAS G13D)
MVVEAVDVN

SEQ ID NO: 91802 - protein, 9 aa, synthetic construct
  source 1..9: note = Seed: VVVGAGDVG (KRAS G13D)
MVVEAVDVQ

SEQ ID NO: 91803 - protein, 9 aa, synthetic construct
  source 1..9: note = Seed: VVVGAGDVG (KRAS G13D)
MVVEAVDVS

SEQ ID NO: 91804 - protein, 9 aa, synthetic construct
  source 1..9: note = Seed: VVVGAGDVG (KRAS G13D)
MVVEAVDVT

SEQ ID NO: 91805 - protein, 9 aa, synthetic construct
  source 1..9: note = Seed: VVVGAGDVG (KRAS G13D)
MVVEAVDVV

SEQ ID NO: 91806 - protein, 9 aa, synthetic construct
  source 1..9: note = Seed: VVVGAGDVG (KRAS G13D)
MVVFAADVA

SEQ ID NO: 91807 - protein, 9 aa, synthetic construct
  source 1..9: note = Seed: VVVGAGDVG (KRAS G13D)
MVVFAADVD

SEQ ID NO: 91808 - protein, 9 aa, synthetic construct
  source 1..9: note = Seed: VVVGAGDVG (KRAS G13D)
MVVFAADVE

SEQ ID NO: 91809 - protein, 9 aa, synthetic construct
  source 1..9: note = Seed: VVVGAGDVG (KRAS G13D)
MVVFAADVF

SEQ ID NO: 91810 - protein, 9 aa, synthetic construct
  source 1..9: note = Seed: VVVGAGDVG (KRAS G13D)
MVVFAADVG

SEQ ID NO: 91811 - protein, 9 aa, synthetic construct
  source 1..9: note = Seed: VVVGAGDVG (KRAS G13D)
MVVFAADVH

SEQ ID NO: 91812 - protein, 9 aa, synthetic construct
  source 1..9: note = Seed: VVVGAGDVG (KRAS G13D)
MVVFAADVI

SEQ ID NO: 91813 - protein, 9 aa, synthetic construct
  source 1..9: note = Seed: VVVGAGDVG (KRAS G13D)
MVVFAADVL

SEQ ID NO: 91814 - protein, 9 aa, synthetic construct
  source 1..9: note = Seed: VVVGAGDVG (KRAS G13D)
MVVFAADVM

SEQ ID NO: 91815 - protein, 9 aa, synthetic construct
  source 1..9: note = Seed: VVVGAGDVG (KRAS G13D)
MVVFAADVN

SEQ ID NO: 91816 - protein, 9 aa, synthetic construct
  source 1..9: note = Seed: VVVGAGDVG (KRAS G13D)
MVVFAADVQ

SEQ ID NO: 91817 - protein, 9 aa, synthetic construct
  source 1..9: note = Seed: VVVGAGDVG (KRAS G13D)
MVVFAADVR

SEQ ID NO: 91818 - protein, 9 aa, synthetic construct
  source 1..9: note = Seed: VVVGAGDVG (KRAS G13D)
MVVFAADVS

SEQ ID NO: 91819 - protein, 9 aa, synthetic construct
  source 1..9: note = Seed: VVVGAGDVG (KRAS G13D)
MVVFAADVT

SEQ ID NO: 91820 - protein, 9 aa, synthetic construct
  source 1..9: note = Seed: VVVGAGDVG (KRAS G13D)
MVVFAADVV

SEQ ID NO: 91821 - protein, 9 aa, synthetic construct
  source 1..9: note = Seed: VVVGAGDVG (KRAS G13D)
MVVFAADVY

SEQ ID NO: 91822 - protein, 9 aa, synthetic construct
  source 1..9: note = Seed: VVVGAGDVG (KRAS G13D)
MVVFADDVA

SEQ ID NO: 91823 - protein, 9 aa, synthetic construct
  source 1..9: note = Seed: VVVGAGDVG (KRAS G13D)
MVVFADDVC

SEQ ID NO: 91824 - protein, 9 aa, synthetic construct
  source 1..9: note = Seed: VVVGAGDVG (KRAS G13D)
MVVFADDVD

SEQ ID NO: 91825 - protein, 9 aa, synthetic construct
  source 1..9: note = Seed: VVVGAGDVG (KRAS G13D)
MVVFADDVE

SEQ ID NO: 91826 - protein, 9 aa, synthetic construct
  source 1..9: note = Seed: VVVGAGDVG (KRAS G13D)
MVVFADDVF

SEQ ID NO: 91827 - protein, 9 aa, synthetic construct
  source 1..9: note = Seed: VVVGAGDVG (KRAS G13D)
MVVFADDVG

SEQ ID NO: 91828 - protein, 9 aa, synthetic construct
  source 1..9: note = Seed: VVVGAGDVG (KRAS G13D)
MVVFADDVH

SEQ ID NO: 91829 - protein, 9 aa, synthetic construct
  source 1..9: note = Seed: VVVGAGDVG (KRAS G13D)
MVVFADDVI

SEQ ID NO: 91830 - protein, 9 aa, synthetic construct
  source 1..9: note = Seed: VVVGAGDVG (KRAS G13D)
MVVFADDVK

SEQ ID NO: 91831 - protein, 9 aa, synthetic construct
  source 1..9: note = Seed: VVVGAGDVG (KRAS G13D)
MVVFADDVL

SEQ ID NO: 91832 - protein, 9 aa, synthetic construct
  source 1..9: note = Seed: VVVGAGDVG (KRAS G13D)
MVVFADDVM

SEQ ID NO: 91833 - protein, 9 aa, synthetic construct
  source 1..9: note = Seed: VVVGAGDVG (KRAS G13D)
MVVFADDVN

SEQ ID NO: 91834 - protein, 9 aa, synthetic construct
  source 1..9: note = Seed: VVVGAGDVG (KRAS G13D)
MVVFADDVP

SEQ ID NO: 91835 - protein, 9 aa, synthetic construct
  source 1..9: note = Seed: VVVGAGDVG (KRAS G13D)
MVVFADDVQ

SEQ ID NO: 91836 - protein, 9 aa, synthetic construct
  source 1..9: note = Seed: VVVGAGDVG (KRAS G13D)
MVVFADDVR

SEQ ID NO: 91837 - protein, 9 aa, synthetic construct
  source 1..9: note = Seed: VVVGAGDVG (KRAS G13D)
MVVFADDVS

SEQ ID NO: 91838 - protein, 9 aa, synthetic construct
  source 1..9: note = Seed: VVVGAGDVG (KRAS G13D)
MVVFADDVT

SEQ ID NO: 91839 - protein, 9 aa, synthetic construct
  source 1..9: note = Seed: VVVGAGDVG (KRAS G13D)
MVVFADDVV

SEQ ID NO: 91840 - protein, 9 aa, synthetic construct
  source 1..9: note = Seed: VVVGAGDVG (KRAS G13D)
MVVFADDVW

SEQ ID NO: 91841 - protein, 9 aa, synthetic construct
  source 1..9: note = Seed: VVVGAGDVG (KRAS G13D)
MVVFADDVY

SEQ ID NO: 91842 - protein, 9 aa, synthetic construct
  source 1..9: note = Seed: VVVGAGDVG (KRAS G13D)
MVVFAEDVA

SEQ ID NO: 91843 - protein, 9 aa, synthetic construct
  source 1..9: note = Seed: VVVGAGDVG (KRAS G13D)
MVVFAEDVF

SEQ ID NO: 91844 - protein, 9 aa, synthetic construct
  source 1..9: note = Seed: VVVGAGDVG (KRAS G13D)
MVVFAEDVI

SEQ ID NO: 91845 - protein, 9 aa, synthetic construct
  source 1..9: note = Seed: VVVGAGDVG (KRAS G13D)
MVVFAEDVL

SEQ ID NO: 91846 - protein, 9 aa, synthetic construct
  source 1..9: note = Seed: VVVGAGDVG (KRAS G13D)
MVVFAEDVM

SEQ ID NO: 91847 - protein, 9 aa, synthetic construct
  source 1..9: note = Seed: VVVGAGDVG (KRAS G13D)
MVVFAEDVQ

SEQ ID NO: 91848 - protein, 9 aa, synthetic construct
  source 1..9: note = Seed: VVVGAGDVG (KRAS G13D)
MVVFAEDVS

SEQ ID NO: 91849 - protein, 9 aa, synthetic construct
  source 1..9: note = Seed: VVVGAGDVG (KRAS G13D)
MVVFAEDVV

SEQ ID NO: 91850 - protein, 9 aa, synthetic construct
  source 1..9: note = Seed: VVVGAGDVG (KRAS G13D)
MVVFAEDVY

SEQ ID NO: 91851 - protein, 9 aa, synthetic construct
  source 1..9: note = Seed: VVVGAGDVG (KRAS G13D)
MVVFAGDVA

SEQ ID NO: 91852 - protein, 9 aa, synthetic construct
  source 1..9: note = Seed: VVVGAGDVG (KRAS G13D)
MVVFAGDVI

SEQ ID NO: 91853 - protein, 9 aa, synthetic construct
  source 1..9: note = Seed: VVVGAGDVG (KRAS G13D)
MVVFAGDVL

SEQ ID NO: 91854 - protein, 9 aa, synthetic construct
  source 1..9: note = Seed: VVVGAGDVG (KRAS G13D)
MVVFAGDVM

SEQ ID NO: 91855 - protein, 9 aa, synthetic construct
  source 1..9: note = Seed: VVVGAGDVG (KRAS G13D)
MVVFAGDVS

SEQ ID NO: 91856 - protein, 9 aa, synthetic construct
  source 1..9: note = Seed: VVVGAGDVG (KRAS G13D)
MVVFAGDVV

SEQ ID NO: 91857 - protein, 9 aa, synthetic construct
  source 1..9: note = Seed: VVVGAGDVG (KRAS G13D)
MVVFAHDVA

SEQ ID NO: 91858 - protein, 9 aa, synthetic construct
  source 1..9: note = Seed: VVVGAGDVG (KRAS G13D)
MVVFAHDVG

SEQ ID NO: 91859 - protein, 9 aa, synthetic construct
  source 1..9: note = Seed: VVVGAGDVG (KRAS G13D)
MVVFAHDVI

SEQ ID NO: 91860 - protein, 9 aa, synthetic construct
  source 1..9: note = Seed: VVVGAGDVG (KRAS G13D)
MVVFAHDVL

SEQ ID NO: 91861 - protein, 9 aa, synthetic construct
  source 1..9: note = Seed: VVVGAGDVG (KRAS G13D)
MVVFAHDVM

SEQ ID NO: 91862 - protein, 9 aa, synthetic construct
  source 1..9: note = Seed: VVVGAGDVG (KRAS G13D)
MVVFAHDVS

SEQ ID NO: 91863 - protein, 9 aa, synthetic construct
  source 1..9: note = Seed: VVVGAGDVG (KRAS G13D)
MVVFAHDVV

SEQ ID NO: 91864 - protein, 9 aa, synthetic construct
  source 1..9: note = Seed: VVVGAGDVG (KRAS G13D)
MVVFAHDVY

SEQ ID NO: 91865 - protein, 9 aa, synthetic construct
  source 1..9: note = Seed: VVVGAGDVG (KRAS G13D)
MVVFAIDVA

SEQ ID NO: 91866 - protein, 9 aa, synthetic construct
  source 1..9: note = Seed: VVVGAGDVG (KRAS G13D)
MVVFAIDVE

SEQ ID NO: 91867 - protein, 9 aa, synthetic construct
  source 1..9: note = Seed: VVVGAGDVG (KRAS G13D)
MVVFAIDVM

SEQ ID NO: 91868 - protein, 9 aa, synthetic construct
  source 1..9: note = Seed: VVVGAGDVG (KRAS G13D)
MVVFAIDVN

SEQ ID NO: 91869 - protein, 9 aa, synthetic construct
  source 1..9: note = Seed: VVVGAGDVG (KRAS G13D)
MVVFAIDVQ

SEQ ID NO: 91870 - protein, 9 aa, synthetic construct
  source 1..9: note = Seed: VVVGAGDVG (KRAS G13D)
MVVFAIDVR

SEQ ID NO: 91871 - protein, 9 aa, synthetic construct
  source 1..9: note = Seed: VVVGAGDVG (KRAS G13D)
MVVFAIDVS

SEQ ID NO: 91872 - protein, 9 aa, synthetic construct
  source 1..9: note = Seed: VVVGAGDVG (KRAS G13D)
MVVFAIDVV

SEQ ID NO: 91873 - protein, 9 aa, synthetic construct
  source 1..9: note = Seed: VVVGAGDVG (KRAS G13D)
MVVFAIDVY

SEQ ID NO: 91874 - protein, 9 aa, synthetic construct
  source 1..9: note = Seed: VVVGAGDVG (KRAS G13D)
MVVFALDVA

SEQ ID NO: 91875 - protein, 9 aa, synthetic construct
  source 1..9: note = Seed: VVVGAGDVG (KRAS G13D)
MVVFALDVQ

SEQ ID NO: 91876 - protein, 9 aa, synthetic construct
  source 1..9: note = Seed: VVVGAGDVG (KRAS G13D)
MVVFALDVY

SEQ ID NO: 91877 - protein, 9 aa, synthetic construct
  source 1..9: note = Seed: VVVGAGDVG (KRAS G13D)
MVVFAMDVA

SEQ ID NO: 91878 - protein, 9 aa, synthetic construct
  source 1..9: note = Seed: VVVGAGDVG (KRAS G13D)
MVVFAMDVI

SEQ ID NO: 91879 - protein, 9 aa, synthetic construct
  source 1..9: note = Seed: VVVGAGDVG (KRAS G13D)
MVVFAMDVM

SEQ ID NO: 91880 - protein, 9 aa, synthetic construct
  source 1..9: note = Seed: VVVGAGDVG (KRAS G13D)
MVVFAMDVR

SEQ ID NO: 91881 - protein, 9 aa, synthetic construct
  source 1..9: note = Seed: VVVGAGDVG (KRAS G13D)
MVVFAMDVS

SEQ ID NO: 91882 - protein, 9 aa, synthetic construct
  source 1..9: note = Seed: VVVGAGDVG (KRAS G13D)
MVVFAMDVV

SEQ ID NO: 91883 - protein, 9 aa, synthetic construct
  source 1..9: note = Seed: VVVGAGDVG (KRAS G13D)
MVVFAMDVY

SEQ ID NO: 91884 - protein, 9 aa, synthetic construct
  source 1..9: note = Seed: VVVGAGDVG (KRAS G13D)
MVVFANDVA

SEQ ID NO: 91885 - protein, 9 aa, synthetic construct
  source 1..9: note = Seed: VVVGAGDVG (KRAS G13D)
MVVFANDVC

SEQ ID NO: 91886 - protein, 9 aa, synthetic construct
  source 1..9: note = Seed: VVVGAGDVG (KRAS G13D)
MVVFANDVD

SEQ ID NO: 91887 - protein, 9 aa, synthetic construct
  source 1..9: note = Seed: VVVGAGDVG (KRAS G13D)
MVVFANDVE

SEQ ID NO: 91888 - protein, 9 aa, synthetic construct
  source 1..9: note = Seed: VVVGAGDVG (KRAS G13D)
MVVFANDVF

SEQ ID NO: 91889 - protein, 9 aa, synthetic construct
  source 1..9: note = Seed: VVVGAGDVG (KRAS G13D)
MVVFANDVG

SEQ ID NO: 91890 - protein, 9 aa, synthetic construct
  source 1..9: note = Seed: VVVGAGDVG (KRAS G13D)
MVVFANDVH

SEQ ID NO: 91891 - protein, 9 aa, synthetic construct
  source 1..9: note = Seed: VVVGAGDVG (KRAS G13D)
MVVFANDVI

SEQ ID NO: 91892 - protein, 9 aa, synthetic construct
  source 1..9: note = Seed: VVVGAGDVG (KRAS G13D)
MVVFANDVK

SEQ ID NO: 91893 - protein, 9 aa, synthetic construct
  source 1..9: note = Seed: VVVGAGDVG (KRAS G13D)
MVVFANDVL

SEQ ID NO: 91894 - protein, 9 aa, synthetic construct
  source 1..9: note = Seed: VVVGAGDVG (KRAS G13D)
MVVFANDVM

SEQ ID NO: 91895 - protein, 9 aa, synthetic construct
  source 1..9: note = Seed: VVVGAGDVG (KRAS G13D)
MVVFANDVN

SEQ ID NO: 91896 - protein, 9 aa, synthetic construct
  source 1..9: note = Seed: VVVGAGDVG (KRAS G13D)
MVVFANDVP

SEQ ID NO: 91897 - protein, 9 aa, synthetic construct
  source 1..9: note = Seed: VVVGAGDVG (KRAS G13D)
MVVFANDVQ

SEQ ID NO: 91898 - protein, 9 aa, synthetic construct
  source 1..9: note = Seed: VVVGAGDVG (KRAS G13D)
MVVFANDVS

SEQ ID NO: 91899 - protein, 9 aa, synthetic construct
  source 1..9: note = Seed: VVVGAGDVG (KRAS G13D)
MVVFANDVT

SEQ ID NO: 91900 - protein, 9 aa, synthetic construct
  source 1..9: note = Seed: VVVGAGDVG (KRAS G13D)
MVVFANDVV

SEQ ID NO: 91901 - protein, 9 aa, synthetic construct
  source 1..9: note = Seed: VVVGAGDVG (KRAS G13D)
MVVFANDVW

SEQ ID NO: 91902 - protein, 9 aa, synthetic construct
  source 1..9: note = Seed: VVVGAGDVG (KRAS G13D)
MVVFANDVY

SEQ ID NO: 91903 - protein, 9 aa, synthetic construct
  source 1..9: note = Seed: VVVGAGDVG (KRAS G13D)
MVVFAPDVA

SEQ ID NO: 91904 - protein, 9 aa, synthetic construct
  source 1..9: note = Seed: VVVGAGDVG (KRAS G13D)
MVVFAPDVC

SEQ ID NO: 91905 - protein, 9 aa, synthetic construct
  source 1..9: note = Seed: VVVGAGDVG (KRAS G13D)
MVVFAPDVD

SEQ ID NO: 91906 - protein, 9 aa, synthetic construct
  source 1..9: note = Seed: VVVGAGDVG (KRAS G13D)
MVVFAPDVE

SEQ ID NO: 91907 - protein, 9 aa, synthetic construct
  source 1..9: note = Seed: VVVGAGDVG (KRAS G13D)
MVVFAPDVF

SEQ ID NO: 91908 - protein, 9 aa, synthetic construct
  source 1..9: note = Seed: VVVGAGDVG (KRAS G13D)
MVVFAPDVG

SEQ ID NO: 91909 - protein, 9 aa, synthetic construct
  source 1..9: note = Seed: VVVGAGDVG (KRAS G13D)
MVVFAPDVH

SEQ ID NO: 91910 - protein, 9 aa, synthetic construct
  source 1..9: note = Seed: VVVGAGDVG (KRAS G13D)
MVVFAPDVI

SEQ ID NO: 91911 - protein, 9 aa, synthetic construct
  source 1..9: note = Seed: VVVGAGDVG (KRAS G13D)
MVVFAPDVK

SEQ ID NO: 91912 - protein, 9 aa, synthetic construct
  source 1..9: note = Seed: VVVGAGDVG (KRAS G13D)
MVVFAPDVL

SEQ ID NO: 91913 - protein, 9 aa, synthetic construct
  source 1..9: note = Seed: VVVGAGDVG (KRAS G13D)
MVVFAPDVM

SEQ ID NO: 91914 - protein, 9 aa, synthetic construct
  source 1..9: note = Seed: VVVGAGDVG (KRAS G13D)
MVVFAPDVN

SEQ ID NO: 91915 - protein, 9 aa, synthetic construct
  source 1..9: note = Seed: VVVGAGDVG (KRAS G13D)
MVVFAPDVP

SEQ ID NO: 91916 - protein, 9 aa, synthetic construct
  source 1..9: note = Seed: VVVGAGDVG (KRAS G13D)
MVVFAPDVQ

SEQ ID NO: 91917 - protein, 9 aa, synthetic construct
  source 1..9: note = Seed: VVVGAGDVG (KRAS G13D)
MVVFAPDVS

SEQ ID NO: 91918 - protein, 9 aa, synthetic construct
  source 1..9: note = Seed: VVVGAGDVG (KRAS G13D)
MVVFAPDVT

SEQ ID NO: 91919 - protein, 9 aa, synthetic construct
  source 1..9: note = Seed: VVVGAGDVG (KRAS G13D)
MVVFAPDVV

SEQ ID NO: 91920 - protein, 9 aa, synthetic construct
  source 1..9: note = Seed: VVVGAGDVG (KRAS G13D)
MVVFAPDVW

SEQ ID NO: 91921 - protein, 9 aa, synthetic construct
  source 1..9: note = Seed: VVVGAGDVG (KRAS G13D)
MVVFAPDVY

SEQ ID NO: 91922 - protein, 9 aa, synthetic construct
  source 1..9: note = Seed: VVVGAGDVG (KRAS G13D)
MVVFAQDVA

SEQ ID NO: 91923 - protein, 9 aa, synthetic construct
  source 1..9: note = Seed: VVVGAGDVG (KRAS G13D)
MVVFAQDVF

SEQ ID NO: 91924 - protein, 9 aa, synthetic construct
  source 1..9: note = Seed: VVVGAGDVG (KRAS G13D)
MVVFAQDVI

SEQ ID NO: 91925 - protein, 9 aa, synthetic construct
  source 1..9: note = Seed: VVVGAGDVG (KRAS G13D)
MVVFAQDVL

SEQ ID NO: 91926 - protein, 9 aa, synthetic construct
  source 1..9: note = Seed: VVVGAGDVG (KRAS G13D)
MVVFAQDVM

SEQ ID NO: 91927 - protein, 9 aa, synthetic construct
  source 1..9: note = Seed: VVVGAGDVG (KRAS G13D)
MVVFAQDVN

SEQ ID NO: 91928 - protein, 9 aa, synthetic construct
  source 1..9: note = Seed: VVVGAGDVG (KRAS G13D)
MVVFAQDVQ

SEQ ID NO: 91929 - protein, 9 aa, synthetic construct
  source 1..9: note = Seed: VVVGAGDVG (KRAS G13D)
MVVFAQDVS

SEQ ID NO: 91930 - protein, 9 aa, synthetic construct
  source 1..9: note = Seed: VVVGAGDVG (KRAS G13D)
MVVFAQDVV

SEQ ID NO: 91931 - protein, 9 aa, synthetic construct
  source 1..9: note = Seed: VVVGAGDVG (KRAS G13D)
MVVFAQDVY

SEQ ID NO: 91932 - protein, 9 aa, synthetic construct
  source 1..9: note = Seed: VVVGAGDVG (KRAS G13D)
MVVFARDVA

SEQ ID NO: 91933 - protein, 9 aa, synthetic construct
  source 1..9: note = Seed: VVVGAGDVG (KRAS G13D)
MVVFASDVA

SEQ ID NO: 91934 - protein, 9 aa, synthetic construct
  source 1..9: note = Seed: VVVGAGDVG (KRAS G13D)
MVVFASDVD

SEQ ID NO: 91935 - protein, 9 aa, synthetic construct
  source 1..9: note = Seed: VVVGAGDVG (KRAS G13D)
MVVFASDVE

SEQ ID NO: 91936 - protein, 9 aa, synthetic construct
  source 1..9: note = Seed: VVVGAGDVG (KRAS G13D)
MVVFASDVF

SEQ ID NO: 91937 - protein, 9 aa, synthetic construct
  source 1..9: note = Seed: VVVGAGDVG (KRAS G13D)
MVVFASDVG

SEQ ID NO: 91938 - protein, 9 aa, synthetic construct
  source 1..9: note = Seed: VVVGAGDVG (KRAS G13D)
MVVFASDVH

SEQ ID NO: 91939 - protein, 9 aa, synthetic construct
  source 1..9: note = Seed: VVVGAGDVG (KRAS G13D)
MVVFASDVI

SEQ ID NO: 91940 - protein, 9 aa, synthetic construct
  source 1..9: note = Seed: VVVGAGDVG (KRAS G13D)
MVVFASDVL

SEQ ID NO: 91941 - protein, 9 aa, synthetic construct
  source 1..9: note = Seed: VVVGAGDVG (KRAS G13D)
MVVFASDVM

SEQ ID NO: 91942 - protein, 9 aa, synthetic construct
  source 1..9: note = Seed: VVVGAGDVG (KRAS G13D)
MVVFASDVN

SEQ ID NO: 91943 - protein, 9 aa, synthetic construct
  source 1..9: note = Seed: VVVGAGDVG (KRAS G13D)
MVVFASDVQ

SEQ ID NO: 91944 - protein, 9 aa, synthetic construct
  source 1..9: note = Seed: VVVGAGDVG (KRAS G13D)
MVVFASDVR

SEQ ID NO: 91945 - protein, 9 aa, synthetic construct
  source 1..9: note = Seed: VVVGAGDVG (KRAS G13D)
MVVFASDVS

SEQ ID NO: 91946 - protein, 9 aa, synthetic construct
  source 1..9: note = Seed: VVVGAGDVG (KRAS G13D)
MVVFASDVT

SEQ ID NO: 91947 - protein, 9 aa, synthetic construct
  source 1..9: note = Seed: VVVGAGDVG (KRAS G13D)
MVVFASDVV

SEQ ID NO: 91948 - protein, 9 aa, synthetic construct
  source 1..9: note = Seed: VVVGAGDVG (KRAS G13D)
MVVFASDVY

SEQ ID NO: 91949 - protein, 9 aa, synthetic construct
  source 1..9: note = Seed: VVVGAGDVG (KRAS G13D)
MVVFATDVA

SEQ ID NO: 91950 - protein, 9 aa, synthetic construct
  source 1..9: note = Seed: VVVGAGDVG (KRAS G13D)
MVVFATDVF

SEQ ID NO: 91951 - protein, 9 aa, synthetic construct
  source 1..9: note = Seed: VVVGAGDVG (KRAS G13D)
MVVFATDVG

SEQ ID NO: 91952 - protein, 9 aa, synthetic construct
  source 1..9: note = Seed: VVVGAGDVG (KRAS G13D)
MVVFATDVH

SEQ ID NO: 91953 - protein, 9 aa, synthetic construct
  source 1..9: note = Seed: VVVGAGDVG (KRAS G13D)
MVVFATDVI

SEQ ID NO: 91954 - protein, 9 aa, synthetic construct
  source 1..9: note = Seed: VVVGAGDVG (KRAS G13D)
MVVFATDVK

SEQ ID NO: 91955 - protein, 9 aa, synthetic construct
  source 1..9: note = Seed: VVVGAGDVG (KRAS G13D)
MVVFATDVL

SEQ ID NO: 91956 - protein, 9 aa, synthetic construct
  source 1..9: note = Seed: VVVGAGDVG (KRAS G13D)
MVVFATDVM

SEQ ID NO: 91957 - protein, 9 aa, synthetic construct
  source 1..9: note = Seed: VVVGAGDVG (KRAS G13D)
MVVFATDVN

SEQ ID NO: 91958 - protein, 9 aa, synthetic construct
  source 1..9: note = Seed: VVVGAGDVG (KRAS G13D)
MVVFATDVQ

SEQ ID NO: 91959 - protein, 9 aa, synthetic construct
  source 1..9: note = Seed: VVVGAGDVG (KRAS G13D)
MVVFATDVR

SEQ ID NO: 91960 - protein, 9 aa, synthetic construct
  source 1..9: note = Seed: VVVGAGDVG (KRAS G13D)
MVVFATDVS

SEQ ID NO: 91961 - protein, 9 aa, synthetic construct
  source 1..9: note = Seed: VVVGAGDVG (KRAS G13D)
MVVFATDVT

SEQ ID NO: 91962 - protein, 9 aa, synthetic construct
  source 1..9: note = Seed: VVVGAGDVG (KRAS G13D)
MVVFATDVV

SEQ ID NO: 91963 - protein, 9 aa, synthetic construct
  source 1..9: note = Seed: VVVGAGDVG (KRAS G13D)
MVVFATDVY

SEQ ID NO: 91964 - protein, 9 aa, synthetic construct
  source 1..9: note = Seed: VVVGAGDVG (KRAS G13D)
MVVFAVDVA

SEQ ID NO: 91965 - protein, 9 aa, synthetic construct
  source 1..9: note = Seed: VVVGAGDVG (KRAS G13D)
MVVFAVDVH

SEQ ID NO: 91966 - protein, 9 aa, synthetic construct
  source 1..9: note = Seed: VVVGAGDVG (KRAS G13D)
MVVFAVDVN

SEQ ID NO: 91967 - protein, 9 aa, synthetic construct
  source 1..9: note = Seed: VVVGAGDVG (KRAS G13D)
MVVFAVDVS

SEQ ID NO: 91968 - protein, 9 aa, synthetic construct
  source 1..9: note = Seed: VVVGAGDVG (KRAS G13D)
MVVFAVDVY

SEQ ID NO: 91969 - protein, 9 aa, synthetic construct
  source 1..9: note = Seed: VVVGAGDVG (KRAS G13D)
MVVGAADVA

SEQ ID NO: 91970 - protein, 9 aa, synthetic construct
  source 1..9: note = Seed: VVVGAGDVG (KRAS G13D)
MVVGAADVD

SEQ ID NO: 91971 - protein, 9 aa, synthetic construct
  source 1..9: note = Seed: VVVGAGDVG (KRAS G13D)
MVVGAADVG

SEQ ID NO: 91972 - protein, 9 aa, synthetic construct
  source 1..9: note = Seed: VVVGAGDVG (KRAS G13D)
MVVGAADVH

SEQ ID NO: 91973 - protein, 9 aa, synthetic construct
  source 1..9: note = Seed: VVVGAGDVG (KRAS G13D)
MVVGAADVI

SEQ ID NO: 91974 - protein, 9 aa, synthetic construct
  source 1..9: note = Seed: VVVGAGDVG (KRAS G13D)
MVVGAADVL

SEQ ID NO: 91975 - protein, 9 aa, synthetic construct
  source 1..9: note = Seed: VVVGAGDVG (KRAS G13D)
MVVGAADVM

SEQ ID NO: 91976 - protein, 9 aa, synthetic construct
  source 1..9: note = Seed: VVVGAGDVG (KRAS G13D)
MVVGAADVN

SEQ ID NO: 91977 - protein, 9 aa, synthetic construct
  source 1..9: note = Seed: VVVGAGDVG (KRAS G13D)
MVVGAADVQ

SEQ ID NO: 91978 - protein, 9 aa, synthetic construct
  source 1..9: note = Seed: VVVGAGDVG (KRAS G13D)
MVVGAADVS

SEQ ID NO: 91979 - protein, 9 aa, synthetic construct
  source 1..9: note = Seed: VVVGAGDVG (KRAS G13D)
MVVGAADVT

SEQ ID NO: 91980 - protein, 9 aa, synthetic construct
  source 1..9: note = Seed: VVVGAGDVG (KRAS G13D)
MVVGAADVV

SEQ ID NO: 91981 - protein, 9 aa, synthetic construct
  source 1..9: note = Seed: VVVGAGDVG (KRAS G13D)
MVVGAIDVA

SEQ ID NO: 91982 - protein, 9 aa, synthetic construct
  source 1..9: note = Seed: VVVGAGDVG (KRAS G13D)
MVVGAIDVM

SEQ ID NO: 91983 - protein, 9 aa, synthetic construct
  source 1..9: note = Seed: VVVGAGDVG (KRAS G13D)
MVVGAIDVS

SEQ ID NO: 91984 - protein, 9 aa, synthetic construct
  source 1..9: note = Seed: VVVGAGDVG (KRAS G13D)
MVVGAIDVT

SEQ ID NO: 91985 - protein, 9 aa, synthetic construct
  source 1..9: note = Seed: VVVGAGDVG (KRAS G13D)
MVVGAIDVV

SEQ ID NO: 91986 - protein, 9 aa, synthetic construct
  source 1..9: note = Seed: VVVGAGDVG (KRAS G13D)
MVVGALDVA

SEQ ID NO: 91987 - protein, 9 aa, synthetic construct
  source 1..9: note = Seed: VVVGAGDVG (KRAS G13D)
MVVGALDVM

SEQ ID NO: 91988 - protein, 9 aa, synthetic construct
  source 1..9: note = Seed: VVVGAGDVG (KRAS G13D)
MVVGALDVS

SEQ ID NO: 91989 - protein, 9 aa, synthetic construct
  source 1..9: note = Seed: VVVGAGDVG (KRAS G13D)
MVVGALDVV

SEQ ID NO: 91990 - protein, 9 aa, synthetic construct
  source 1..9: note = Seed: VVVGAGDVG (KRAS G13D)
MVVGANDVA

SEQ ID NO: 91991 - protein, 9 aa, synthetic construct
  source 1..9: note = Seed: VVVGAGDVG (KRAS G13D)
MVVGANDVC

SEQ ID NO: 91992 - protein, 9 aa, synthetic construct
  source 1..9: note = Seed: VVVGAGDVG (KRAS G13D)
MVVGANDVG

SEQ ID NO: 91993 - protein, 9 aa, synthetic construct
  source 1..9: note = Seed: VVVGAGDVG (KRAS G13D)
MVVGANDVM

SEQ ID NO: 91994 - protein, 9 aa, synthetic construct
  source 1..9: note = Seed: VVVGAGDVG (KRAS G13D)
MVVGANDVN

SEQ ID NO: 91995 - protein, 9 aa, synthetic construct
  source 1..9: note = Seed: VVVGAGDVG (KRAS G13D)
MVVGANDVQ

SEQ ID NO: 91996 - protein, 9 aa, synthetic construct
  source 1..9: note = Seed: VVVGAGDVG (KRAS G13D)
MVVGANDVS

SEQ ID NO: 91997 - protein, 9 aa, synthetic construct
  source 1..9: note = Seed: VVVGAGDVG (KRAS G13D)
MVVGANDVV

SEQ ID NO: 91998 - protein, 9 aa, synthetic construct
  source 1..9: note = Seed: VVVGAGDVG (KRAS G13D)
MVVGASDVA

SEQ ID NO: 91999 - protein, 9 aa, synthetic construct
  source 1..9: note = Seed: VVVGAGDVG (KRAS G13D)
MVVGASDVG

SEQ ID NO: 92000 - protein, 9 aa, synthetic construct
  source 1..9: note = Seed: VVVGAGDVG (KRAS G13D)
MVVGASDVI

SEQ ID NO: 92001 - protein, 9 aa, synthetic construct
  source 1..9: note = Seed: VVVGAGDVG (KRAS G13D)
MVVGASDVL

SEQ ID NO: 92002 - protein, 9 aa, synthetic construct
  source 1..9: note = Seed: VVVGAGDVG (KRAS G13D)
MVVGASDVM

SEQ ID NO: 92003 - protein, 9 aa, synthetic construct
  source 1..9: note = Seed: VVVGAGDVG (KRAS G13D)
MVVGASDVN

SEQ ID NO: 92004 - protein, 9 aa, synthetic construct
  source 1..9: note = Seed: VVVGAGDVG (KRAS G13D)
MVVGASDVQ

SEQ ID NO: 92005 - protein, 9 aa, synthetic construct
  source 1..9: note = Seed: VVVGAGDVG (KRAS G13D)
MVVGASDVS

SEQ ID NO: 92006 - protein, 9 aa, synthetic construct
  source 1..9: note = Seed: VVVGAGDVG (KRAS G13D)
MVVGASDVT

SEQ ID NO: 92007 - protein, 9 aa, synthetic construct
  source 1..9: note = Seed: VVVGAGDVG (KRAS G13D)
MVVGASDVV

SEQ ID NO: 92008 - protein, 9 aa, synthetic construct
  source 1..9: note = Seed: VVVGAGDVG (KRAS G13D)
MVVGATDVA

SEQ ID NO: 92009 - protein, 9 aa, synthetic construct
  source 1..9: note = Seed: VVVGAGDVG (KRAS G13D)
MVVGATDVH

SEQ ID NO: 92010 - protein, 9 aa, synthetic construct
  source 1..9: note = Seed: VVVGAGDVG (KRAS G13D)
MVVGATDVI

SEQ ID NO: 92011 - protein, 9 aa, synthetic construct
  source 1..9: note = Seed: VVVGAGDVG (KRAS G13D)
MVVGATDVL

SEQ ID NO: 92012 - protein, 9 aa, synthetic construct
  source 1..9: note = Seed: VVVGAGDVG (KRAS G13D)
MVVGATDVM

SEQ ID NO: 92013 - protein, 9 aa, synthetic construct
  source 1..9: note = Seed: VVVGAGDVG (KRAS G13D)
MVVGATDVN

SEQ ID NO: 92014 - protein, 9 aa, synthetic construct
  source 1..9: note = Seed: VVVGAGDVG (KRAS G13D)
MVVGATDVQ

SEQ ID NO: 92015 - protein, 9 aa, synthetic construct
  source 1..9: note = Seed: VVVGAGDVG (KRAS G13D)
MVVGATDVS

SEQ ID NO: 92016 - protein, 9 aa, synthetic construct
  source 1..9: note = Seed: VVVGAGDVG (KRAS G13D)
MVVGATDVT

SEQ ID NO: 92017 - protein, 9 aa, synthetic construct
  source 1..9: note = Seed: VVVGAGDVG (KRAS G13D)
MVVGATDVV

SEQ ID NO: 92018 - protein, 9 aa, synthetic construct
  source 1..9: note = Seed: VVVGAGDVG (KRAS G13D)
MVVGAVDVA

SEQ ID NO: 92019 - protein, 9 aa, synthetic construct
  source 1..9: note = Seed: VVVGAGDVG (KRAS G13D)
MVVGAVDVH

SEQ ID NO: 92020 - protein, 9 aa, synthetic construct
  source 1..9: note = Seed: VVVGAGDVG (KRAS G13D)
MVVGAVDVI

SEQ ID NO: 92021 - protein, 9 aa, synthetic construct
  source 1..9: note = Seed: VVVGAGDVG (KRAS G13D)
MVVGAVDVM

SEQ ID NO: 92022 - protein, 9 aa, synthetic construct
  source 1..9: note = Seed: VVVGAGDVG (KRAS G13D)
MVVGAVDVN

SEQ ID NO: 92023 - protein, 9 aa, synthetic construct
  source 1..9: note = Seed: VVVGAGDVG (KRAS G13D)
MVVGAVDVQ

SEQ ID NO: 92024 - protein, 9 aa, synthetic construct
  source 1..9: note = Seed: VVVGAGDVG (KRAS G13D)
MVVGAVDVS

SEQ ID NO: 92025 - protein, 9 aa, synthetic construct
  source 1..9: note = Seed: VVVGAGDVG (KRAS G13D)
MVVGAVDVT

SEQ ID NO: 92026 - protein, 9 aa, synthetic construct
  source 1..9: note = Seed: VVVGAGDVG (KRAS G13D)
MVVGAVDVV

SEQ ID NO: 92027 - protein, 9 aa, synthetic construct
  source 1..9: note = Seed: VVVGAGDVG (KRAS G13D)
MVVHAADVC

SEQ ID NO: 92028 - protein, 9 aa, synthetic construct
  source 1..9: note = Seed: VVVGAGDVG (KRAS G13D)
MVVHAADVG

SEQ ID NO: 92029 - protein, 9 aa, synthetic construct
  source 1..9: note = Seed: VVVGAGDVG (KRAS G13D)
MVVHAADVI

SEQ ID NO: 92030 - protein, 9 aa, synthetic construct
  source 1..9: note = Seed: VVVGAGDVG (KRAS G13D)
MVVHAADVL

SEQ ID NO: 92031 - protein, 9 aa, synthetic construct
  source 1..9: note = Seed: VVVGAGDVG (KRAS G13D)
MVVHAADVM

SEQ ID NO: 92032 - protein, 9 aa, synthetic construct
  source 1..9: note = Seed: VVVGAGDVG (KRAS G13D)
MVVHAADVS

SEQ ID NO: 92033 - protein, 9 aa, synthetic construct
  source 1..9: note = Seed: VVVGAGDVG (KRAS G13D)
MVVHAADVV

SEQ ID NO: 92034 - protein, 9 aa, synthetic construct
  source 1..9: note = Seed: VVVGAGDVG (KRAS G13D)
MVVHADDVI

SEQ ID NO: 92035 - protein, 9 aa, synthetic construct
  source 1..9: note = Seed: VVVGAGDVG (KRAS G13D)
MVVHADDVL

SEQ ID NO: 92036 - protein, 9 aa, synthetic construct
  source 1..9: note = Seed: VVVGAGDVG (KRAS G13D)
MVVHAIDVI

SEQ ID NO: 92037 - protein, 9 aa, synthetic construct
  source 1..9: note = Seed: VVVGAGDVG (KRAS G13D)
MVVHAIDVV

SEQ ID NO: 92038 - protein, 9 aa, synthetic construct
  source 1..9: note = Seed: VVVGAGDVG (KRAS G13D)
MVVHALDVA

SEQ ID NO: 92039 - protein, 9 aa, synthetic construct
  source 1..9: note = Seed: VVVGAGDVG (KRAS G13D)
MVVHALDVI

SEQ ID NO: 92040 - protein, 9 aa, synthetic construct
  source 1..9: note = Seed: VVVGAGDVG (KRAS G13D)
MVVHALDVL

SEQ ID NO: 92041 - protein, 9 aa, synthetic construct
  source 1..9: note = Seed: VVVGAGDVG (KRAS G13D)
MVVHALDVM

SEQ ID NO: 92042 - protein, 9 aa, synthetic construct
  source 1..9: note = Seed: VVVGAGDVG (KRAS G13D)
MVVHALDVV

SEQ ID NO: 92043 - protein, 9 aa, synthetic construct
  source 1..9: note = Seed: VVVGAGDVG (KRAS G13D)
MVVHANDVA

SEQ ID NO: 92044 - protein, 9 aa, synthetic construct
  source 1..9: note = Seed: VVVGAGDVG (KRAS G13D)
MVVHANDVS

SEQ ID NO: 92045 - protein, 9 aa, synthetic construct
  source 1..9: note = Seed: VVVGAGDVG (KRAS G13D)
MVVHAPDVA

SEQ ID NO: 92046 - protein, 9 aa, synthetic construct
  source 1..9: note = Seed: VVVGAGDVG (KRAS G13D)
MVVHAPDVS

SEQ ID NO: 92047 - protein, 9 aa, synthetic construct
  source 1..9: note = Seed: VVVGAGDVG (KRAS G13D)
MVVHAPDVV

SEQ ID NO: 92048 - protein, 9 aa, synthetic construct
  source 1..9: note = Seed: VVVGAGDVG (KRAS G13D)
MVVHASDVC

SEQ ID NO: 92049 - protein, 9 aa, synthetic construct
  source 1..9: note = Seed: VVVGAGDVG (KRAS G13D)
MVVHASDVG

SEQ ID NO: 92050 - protein, 9 aa, synthetic construct
  source 1..9: note = Seed: VVVGAGDVG (KRAS G13D)
MVVHASDVI

SEQ ID NO: 92051 - protein, 9 aa, synthetic construct
  source 1..9: note = Seed: VVVGAGDVG (KRAS G13D)
MVVHASDVL

SEQ ID NO: 92052 - protein, 9 aa, synthetic construct
  source 1..9: note = Seed: VVVGAGDVG (KRAS G13D)
MVVHASDVM

SEQ ID NO: 92053 - protein, 9 aa, synthetic construct
  source 1..9: note = Seed: VVVGAGDVG (KRAS G13D)
MVVHASDVS

SEQ ID NO: 92054 - protein, 9 aa, synthetic construct
  source 1..9: note = Seed: VVVGAGDVG (KRAS G13D)
MVVHASDVV

SEQ ID NO: 92055 - protein, 9 aa, synthetic construct
  source 1..9: note = Seed: VVVGAGDVG (KRAS G13D)
MVVHATDVA

SEQ ID NO: 92056 - protein, 9 aa, synthetic construct
  source 1..9: note = Seed: VVVGAGDVG (KRAS G13D)
MVVHATDVG

SEQ ID NO: 92057 - protein, 9 aa, synthetic construct
  source 1..9: note = Seed: VVVGAGDVG (KRAS G13D)
MVVHATDVL

SEQ ID NO: 92058 - protein, 9 aa, synthetic construct
  source 1..9: note = Seed: VVVGAGDVG (KRAS G13D)
MVVHATDVN

SEQ ID NO: 92059 - protein, 9 aa, synthetic construct
  source 1..9: note = Seed: VVVGAGDVG (KRAS G13D)
MVVHATDVS

SEQ ID NO: 92060 - protein, 9 aa, synthetic construct
  source 1..9: note = Seed: VVVGAGDVG (KRAS G13D)
MVVHATDVT

SEQ ID NO: 92061 - protein, 9 aa, synthetic construct
  source 1..9: note = Seed: VVVGAGDVG (KRAS G13D)
MVVHAVDVG

SEQ ID NO: 92062 - protein, 9 aa, synthetic construct
  source 1..9: note = Seed: VVVGAGDVG (KRAS G13D)
MVVHAVDVI

SEQ ID NO: 92063 - protein, 9 aa, synthetic construct
  source 1..9: note = Seed: VVVGAGDVG (KRAS G13D)
MVVHAVDVS

SEQ ID NO: 92064 - protein, 9 aa, synthetic construct
  source 1..9: note = Seed: VVVGAGDVG (KRAS G13D)
MVVHAVDVV

SEQ ID NO: 92065 - protein, 9 aa, synthetic construct
  source 1..9: note = Seed: VVVGAGDVG (KRAS G13D)
MVVIAADVA

SEQ ID NO: 92066 - protein, 9 aa, synthetic construct
  source 1..9: note = Seed: VVVGAGDVG (KRAS G13D)
MVVIAADVD

SEQ ID NO: 92067 - protein, 9 aa, synthetic construct
  source 1..9: note = Seed: VVVGAGDVG (KRAS G13D)
MVVIAADVE

SEQ ID NO: 92068 - protein, 9 aa, synthetic construct
  source 1..9: note = Seed: VVVGAGDVG (KRAS G13D)
MVVIAADVF

SEQ ID NO: 92069 - protein, 9 aa, synthetic construct
  source 1..9: note = Seed: VVVGAGDVG (KRAS G13D)
MVVIAADVG

SEQ ID NO: 92070 - protein, 9 aa, synthetic construct
  source 1..9: note = Seed: VVVGAGDVG (KRAS G13D)
MVVIAADVH

SEQ ID NO: 92071 - protein, 9 aa, synthetic construct
  source 1..9: note = Seed: VVVGAGDVG (KRAS G13D)
MVVIAADVI

SEQ ID NO: 92072 - protein, 9 aa, synthetic construct
  source 1..9: note = Seed: VVVGAGDVG (KRAS G13D)
MVVIAADVL

SEQ ID NO: 92073 - protein, 9 aa, synthetic construct
  source 1..9: note = Seed: VVVGAGDVG (KRAS G13D)
MVVIAADVM

SEQ ID NO: 92074 - protein, 9 aa, synthetic construct
  source 1..9: note = Seed: VVVGAGDVG (KRAS G13D)
MVVIAADVN

SEQ ID NO: 92075 - protein, 9 aa, synthetic construct
  source 1..9: note = Seed: VVVGAGDVG (KRAS G13D)
MVVIAADVQ

SEQ ID NO: 92076 - protein, 9 aa, synthetic construct
  source 1..9: note = Seed: VVVGAGDVG (KRAS G13D)
MVVIAADVS

SEQ ID NO: 92077 - protein, 9 aa, synthetic construct
  source 1..9: note = Seed: VVVGAGDVG (KRAS G13D)
MVVIAADVT

SEQ ID NO: 92078 - protein, 9 aa, synthetic construct
  source 1..9: note = Seed: VVVGAGDVG (KRAS G13D)
MVVIAADVV

SEQ ID NO: 92079 - protein, 9 aa, synthetic construct
  source 1..9: note = Seed: VVVGAGDVG (KRAS G13D)
MVVIAADVY

SEQ ID NO: 92080 - protein, 9 aa, synthetic construct
  source 1..9: note = Seed: VVVGAGDVG (KRAS G13D)
MVVIADDVA

SEQ ID NO: 92081 - protein, 9 aa, synthetic construct
  source 1..9: note = Seed: VVVGAGDVG (KRAS G13D)
MVVIADDVF

SEQ ID NO: 92082 - protein, 9 aa, synthetic construct
  source 1..9: note = Seed: VVVGAGDVG (KRAS G13D)
MVVIADDVI

SEQ ID NO: 92083 - protein, 9 aa, synthetic construct
  source 1..9: note = Seed: VVVGAGDVG (KRAS G13D)
MVVIADDVL

SEQ ID NO: 92084 - protein, 9 aa, synthetic construct
  source 1..9: note = Seed: VVVGAGDVG (KRAS G13D)
MVVIADDVM

SEQ ID NO: 92085 - protein, 9 aa, synthetic construct
  source 1..9: note = Seed: VVVGAGDVG (KRAS G13D)
MVVIADDVS

SEQ ID NO: 92086 - protein, 9 aa, synthetic construct
  source 1..9: note = Seed: VVVGAGDVG (KRAS G13D)
MVVIADDVV

SEQ ID NO: 92087 - protein, 9 aa, synthetic construct
  source 1..9: note = Seed: VVVGAGDVG (KRAS G13D)
MVVIAGDVA

SEQ ID NO: 92088 - protein, 9 aa, synthetic construct
  source 1..9: note = Seed: VVVGAGDVG (KRAS G13D)
MVVIAGDVH

SEQ ID NO: 92089 - protein, 9 aa, synthetic construct
  source 1..9: note = Seed: VVVGAGDVG (KRAS G13D)
MVVIAGDVN

SEQ ID NO: 92090 - protein, 9 aa, synthetic construct
  source 1..9: note = Seed: VVVGAGDVG (KRAS G13D)
MVVIAGDVQ

SEQ ID NO: 92091 - protein, 9 aa, synthetic construct
  source 1..9: note = Seed: VVVGAGDVG (KRAS G13D)
MVVIAGDVS

SEQ ID NO: 92092 - protein, 9 aa, synthetic construct
  source 1..9: note = Seed: VVVGAGDVG (KRAS G13D)
MVVIAGDVT

SEQ ID NO: 92093 - protein, 9 aa, synthetic construct
  source 1..9: note = Seed: VVVGAGDVG (KRAS G13D)
MVVIAHDVA

SEQ ID NO: 92094 - protein, 9 aa, synthetic construct
  source 1..9: note = Seed: VVVGAGDVG (KRAS G13D)
MVVIAHDVG

SEQ ID NO: 92095 - protein, 9 aa, synthetic construct
  source 1..9: note = Seed: VVVGAGDVG (KRAS G13D)
MVVIAHDVN

SEQ ID NO: 92096 - protein, 9 aa, synthetic construct
  source 1..9: note = Seed: VVVGAGDVG (KRAS G13D)
MVVIAHDVS

SEQ ID NO: 92097 - protein, 9 aa, synthetic construct
  source 1..9: note = Seed: VVVGAGDVG (KRAS G13D)
MVVIAIDVA

SEQ ID NO: 92098 - protein, 9 aa, synthetic construct
  source 1..9: note = Seed: VVVGAGDVG (KRAS G13D)
MVVIAIDVS

SEQ ID NO: 92099 - protein, 9 aa, synthetic construct
  source 1..9: note = Seed: VVVGAGDVG (KRAS G13D)
MVVIAKDVA

SEQ ID NO: 92100 - protein, 9 aa, synthetic construct
  source 1..9: note = Seed: VVVGAGDVG (KRAS G13D)
MVVIANDVA

SEQ ID NO: 92101 - protein, 9 aa, synthetic construct
  source 1..9: note = Seed: VVVGAGDVG (KRAS G13D)
MVVIANDVC

SEQ ID NO: 92102 - protein, 9 aa, synthetic construct
  source 1..9: note = Seed: VVVGAGDVG (KRAS G13D)
MVVIANDVD

SEQ ID NO: 92103 - protein, 9 aa, synthetic construct
  source 1..9: note = Seed: VVVGAGDVG (KRAS G13D)
MVVIANDVE

SEQ ID NO: 92104 - protein, 9 aa, synthetic construct
  source 1..9: note = Seed: VVVGAGDVG (KRAS G13D)
MVVIANDVF

SEQ ID NO: 92105 - protein, 9 aa, synthetic construct
  source 1..9: note = Seed: VVVGAGDVG (KRAS G13D)
MVVIANDVG

SEQ ID NO: 92106 - protein, 9 aa, synthetic construct
  source 1..9: note = Seed: VVVGAGDVG (KRAS G13D)
MVVIANDVH

SEQ ID NO: 92107 - protein, 9 aa, synthetic construct
  source 1..9: note = Seed: VVVGAGDVG (KRAS G13D)
MVVIANDVI

SEQ ID NO: 92108 - protein, 9 aa, synthetic construct
  source 1..9: note = Seed: VVVGAGDVG (KRAS G13D)
MVVIANDVL

SEQ ID NO: 92109 - protein, 9 aa, synthetic construct
  source 1..9: note = Seed: VVVGAGDVG (KRAS G13D)
MVVIANDVM

SEQ ID NO: 92110 - protein, 9 aa, synthetic construct
  source 1..9: note = Seed: VVVGAGDVG (KRAS G13D)
MVVIANDVN

SEQ ID NO: 92111 - protein, 9 aa, synthetic construct
  source 1..9: note = Seed: VVVGAGDVG (KRAS G13D)
MVVIANDVP

SEQ ID NO: 92112 - protein, 9 aa, synthetic construct
  source 1..9: note = Seed: VVVGAGDVG (KRAS G13D)
MVVIANDVQ

SEQ ID NO: 92113 - protein, 9 aa, synthetic construct
  source 1..9: note = Seed: VVVGAGDVG (KRAS G13D)
MVVIANDVS

SEQ ID NO: 92114 - protein, 9 aa, synthetic construct
  source 1..9: note = Seed: VVVGAGDVG (KRAS G13D)
MVVIANDVT

SEQ ID NO: 92115 - protein, 9 aa, synthetic construct
  source 1..9: note = Seed: VVVGAGDVG (KRAS G13D)
MVVIANDVV

SEQ ID NO: 92116 - protein, 9 aa, synthetic construct
  source 1..9: note = Seed: VVVGAGDVG (KRAS G13D)
MVVIANDVY

SEQ ID NO: 92117 - protein, 9 aa, synthetic construct
  source 1..9: note = Seed: VVVGAGDVG (KRAS G13D)
MVVIAPDVA

SEQ ID NO: 92118 - protein, 9 aa, synthetic construct
  source 1..9: note = Seed: VVVGAGDVG (KRAS G13D)
MVVIAPDVF

SEQ ID NO: 92119 - protein, 9 aa, synthetic construct
  source 1..9: note = Seed: VVVGAGDVG (KRAS G13D)
MVVIAPDVG

SEQ ID NO: 92120 - protein, 9 aa, synthetic construct
  source 1..9: note = Seed: VVVGAGDVG (KRAS G13D)
MVVIAPDVH

SEQ ID NO: 92121 - protein, 9 aa, synthetic construct
  source 1..9: note = Seed: VVVGAGDVG (KRAS G13D)
MVVIAPDVI

SEQ ID NO: 92122 - protein, 9 aa, synthetic construct
  source 1..9: note = Seed: VVVGAGDVG (KRAS G13D)
MVVIAPDVK

SEQ ID NO: 92123 - protein, 9 aa, synthetic construct
  source 1..9: note = Seed: VVVGAGDVG (KRAS G13D)
MVVIAPDVL

SEQ ID NO: 92124 - protein, 9 aa, synthetic construct
  source 1..9: note = Seed: VVVGAGDVG (KRAS G13D)
MVVIAPDVM

SEQ ID NO: 92125 - protein, 9 aa, synthetic construct
  source 1..9: note = Seed: VVVGAGDVG (KRAS G13D)
MVVIAPDVN

SEQ ID NO: 92126 - protein, 9 aa, synthetic construct
  source 1..9: note = Seed: VVVGAGDVG (KRAS G13D)
MVVIAPDVP

SEQ ID NO: 92127 - protein, 9 aa, synthetic construct
  source 1..9: note = Seed: VVVGAGDVG (KRAS G13D)
MVVIAPDVQ

SEQ ID NO: 92128 - protein, 9 aa, synthetic construct
  source 1..9: note = Seed: VVVGAGDVG (KRAS G13D)
MVVIAPDVR

SEQ ID NO: 92129 - protein, 9 aa, synthetic construct
  source 1..9: note = Seed: VVVGAGDVG (KRAS G13D)
MVVIAPDVS

SEQ ID NO: 92130 - protein, 9 aa, synthetic construct
  source 1..9: note = Seed: VVVGAGDVG (KRAS G13D)
MVVIAPDVT

SEQ ID NO: 92131 - protein, 9 aa, synthetic construct
  source 1..9: note = Seed: VVVGAGDVG (KRAS G13D)
MVVIAPDVV

SEQ ID NO: 92132 - protein, 9 aa, synthetic construct
  source 1..9: note = Seed: VVVGAGDVG (KRAS G13D)
MVVIAPDVW

SEQ ID NO: 92133 - protein, 9 aa, synthetic construct
  source 1..9: note = Seed: VVVGAGDVG (KRAS G13D)
MVVIAPDVY

SEQ ID NO: 92134 - protein, 9 aa, synthetic construct
  source 1..9: note = Seed: VVVGAGDVG (KRAS G13D)
MVVIASDVA

SEQ ID NO: 92135 - protein, 9 aa, synthetic construct
  source 1..9: note = Seed: VVVGAGDVG (KRAS G13D)
MVVIASDVD

SEQ ID NO: 92136 - protein, 9 aa, synthetic construct
  source 1..9: note = Seed: VVVGAGDVG (KRAS G13D)
MVVIASDVE

SEQ ID NO: 92137 - protein, 9 aa, synthetic construct
  source 1..9: note = Seed: VVVGAGDVG (KRAS G13D)
MVVIASDVF

SEQ ID NO: 92138 - protein, 9 aa, synthetic construct
  source 1..9: note = Seed: VVVGAGDVG (KRAS G13D)
MVVIASDVG

SEQ ID NO: 92139 - protein, 9 aa, synthetic construct
  source 1..9: note = Seed: VVVGAGDVG (KRAS G13D)
MVVIASDVH

SEQ ID NO: 92140 - protein, 9 aa, synthetic construct
  source 1..9: note = Seed: VVVGAGDVG (KRAS G13D)
MVVIASDVI

SEQ ID NO: 92141 - protein, 9 aa, synthetic construct
  source 1..9: note = Seed: VVVGAGDVG (KRAS G13D)
MVVIASDVL

SEQ ID NO: 92142 - protein, 9 aa, synthetic construct
  source 1..9: note = Seed: VVVGAGDVG (KRAS G13D)
MVVIASDVM

SEQ ID NO: 92143 - protein, 9 aa, synthetic construct
  source 1..9: note = Seed: VVVGAGDVG (KRAS G13D)
MVVIASDVN

SEQ ID NO: 92144 - protein, 9 aa, synthetic construct
  source 1..9: note = Seed: VVVGAGDVG (KRAS G13D)
MVVIASDVQ

SEQ ID NO: 92145 - protein, 9 aa, synthetic construct
  source 1..9: note = Seed: VVVGAGDVG (KRAS G13D)
MVVIASDVS

SEQ ID NO: 92146 - protein, 9 aa, synthetic construct
  source 1..9: note = Seed: VVVGAGDVG (KRAS G13D)
MVVIASDVT

SEQ ID NO: 92147 - protein, 9 aa, synthetic construct
  source 1..9: note = Seed: VVVGAGDVG (KRAS G13D)
MVVIASDVV

SEQ ID NO: 92148 - protein, 9 aa, synthetic construct
  source 1..9: note = Seed: VVVGAGDVG (KRAS G13D)
MVVIASDVY

SEQ ID NO: 92149 - protein, 9 aa, synthetic construct
  source 1..9: note = Seed: VVVGAGDVG (KRAS G13D)
MVVIATDVA

SEQ ID NO: 92150 - protein, 9 aa, synthetic construct
  source 1..9: note = Seed: VVVGAGDVG (KRAS G13D)
MVVIATDVG

SEQ ID NO: 92151 - protein, 9 aa, synthetic construct
  source 1..9: note = Seed: VVVGAGDVG (KRAS G13D)
MVVIATDVH

SEQ ID NO: 92152 - protein, 9 aa, synthetic construct
  source 1..9: note = Seed: VVVGAGDVG (KRAS G13D)
MVVIATDVI

SEQ ID NO: 92153 - protein, 9 aa, synthetic construct
  source 1..9: note = Seed: VVVGAGDVG (KRAS G13D)
MVVIATDVK

SEQ ID NO: 92154 - protein, 9 aa, synthetic construct
  source 1..9: note = Seed: VVVGAGDVG (KRAS G13D)
MVVIATDVL

SEQ ID NO: 92155 - protein, 9 aa, synthetic construct
  source 1..9: note = Seed: VVVGAGDVG (KRAS G13D)
MVVIATDVM

SEQ ID NO: 92156 - protein, 9 aa, synthetic construct
  source 1..9: note = Seed: VVVGAGDVG (KRAS G13D)
MVVIATDVN

SEQ ID NO: 92157 - protein, 9 aa, synthetic construct
  source 1..9: note = Seed: VVVGAGDVG (KRAS G13D)
MVVIATDVP

SEQ ID NO: 92158 - protein, 9 aa, synthetic construct
  source 1..9: note = Seed: VVVGAGDVG (KRAS G13D)
MVVIATDVQ

SEQ ID NO: 92159 - protein, 9 aa, synthetic construct
  source 1..9: note = Seed: VVVGAGDVG (KRAS G13D)
MVVIATDVR

SEQ ID NO: 92160 - protein, 9 aa, synthetic construct
  source 1..9: note = Seed: VVVGAGDVG (KRAS G13D)
MVVIATDVS

SEQ ID NO: 92161 - protein, 9 aa, synthetic construct
  source 1..9: note = Seed: VVVGAGDVG (KRAS G13D)
MVVIATDVT

SEQ ID NO: 92162 - protein, 9 aa, synthetic construct
  source 1..9: note = Seed: VVVGAGDVG (KRAS G13D)
MVVIATDVV

SEQ ID NO: 92163 - protein, 9 aa, synthetic construct
  source 1..9: note = Seed: VVVGAGDVG (KRAS G13D)
MVVIAVDVA

SEQ ID NO: 92164 - protein, 9 aa, synthetic construct
  source 1..9: note = Seed: VVVGAGDVG (KRAS G13D)
MVVIAVDVH

SEQ ID NO: 92165 - protein, 9 aa, synthetic construct
  source 1..9: note = Seed: VVVGAGDVG (KRAS G13D)
MVVIAVDVN

SEQ ID NO: 92166 - protein, 9 aa, synthetic construct
  source 1..9: note = Seed: VVVGAGDVG (KRAS G13D)
MVVIAVDVQ

SEQ ID NO: 92167 - protein, 9 aa, synthetic construct
  source 1..9: note = Seed: VVVGAGDVG (KRAS G13D)
MVVIAVDVS

SEQ ID NO: 92168 - protein, 9 aa, synthetic construct
  source 1..9: note = Seed: VVVGAGDVG (KRAS G13D)
MVVIAVDVT

SEQ ID NO: 92169 - protein, 9 aa, synthetic construct
  source 1..9: note = Seed: VVVGAGDVG (KRAS G13D)
MVVKAADVC

SEQ ID NO: 92170 - protein, 9 aa, synthetic construct
  source 1..9: note = Seed: VVVGAGDVG (KRAS G13D)
MVVKAADVG

SEQ ID NO: 92171 - protein, 9 aa, synthetic construct
  source 1..9: note = Seed: VVVGAGDVG (KRAS G13D)
MVVKAPDVA

SEQ ID NO: 92172 - protein, 9 aa, synthetic construct
  source 1..9: note = Seed: VVVGAGDVG (KRAS G13D)
MVVKASDVC

SEQ ID NO: 92173 - protein, 9 aa, synthetic construct
  source 1..9: note = Seed: VVVGAGDVG (KRAS G13D)
MVVKATDVG

SEQ ID NO: 92174 - protein, 9 aa, synthetic construct
  source 1..9: note = Seed: VVVGAGDVG (KRAS G13D)
MVVKATDVN

SEQ ID NO: 92175 - protein, 9 aa, synthetic construct
  source 1..9: note = Seed: VVVGAGDVG (KRAS G13D)
MVVKATDVS

SEQ ID NO: 92176 - protein, 9 aa, synthetic construct
  source 1..9: note = Seed: VVVGAGDVG (KRAS G13D)
MVVKAVDVC

SEQ ID NO: 92177 - protein, 9 aa, synthetic construct
  source 1..9: note = Seed: VVVGAGDVG (KRAS G13D)
MVVLAADVA

SEQ ID NO: 92178 - protein, 9 aa, synthetic construct
  source 1..9: note = Seed: VVVGAGDVG (KRAS G13D)
MVVLAADVD

SEQ ID NO: 92179 - protein, 9 aa, synthetic construct
  source 1..9: note = Seed: VVVGAGDVG (KRAS G13D)
MVVLAADVE

SEQ ID NO: 92180 - protein, 9 aa, synthetic construct
  source 1..9: note = Seed: VVVGAGDVG (KRAS G13D)
MVVLAADVG

SEQ ID NO: 92181 - protein, 9 aa, synthetic construct
  source 1..9: note = Seed: VVVGAGDVG (KRAS G13D)
MVVLAADVH

SEQ ID NO: 92182 - protein, 9 aa, synthetic construct
  source 1..9: note = Seed: VVVGAGDVG (KRAS G13D)
MVVLAADVI

SEQ ID NO: 92183 - protein, 9 aa, synthetic construct
  source 1..9: note = Seed: VVVGAGDVG (KRAS G13D)
MVVLAADVK

SEQ ID NO: 92184 - protein, 9 aa, synthetic construct
  source 1..9: note = Seed: VVVGAGDVG (KRAS G13D)
MVVLAADVL

SEQ ID NO: 92185 - protein, 9 aa, synthetic construct
  source 1..9: note = Seed: VVVGAGDVG (KRAS G13D)
MVVLAADVM

SEQ ID NO: 92186 - protein, 9 aa, synthetic construct
  source 1..9: note = Seed: VVVGAGDVG (KRAS G13D)
MVVLAADVN

SEQ ID NO: 92187 - protein, 9 aa, synthetic construct
  source 1..9: note = Seed: VVVGAGDVG (KRAS G13D)
MVVLAADVP

SEQ ID NO: 92188 - protein, 9 aa, synthetic construct
  source 1..9: note = Seed: VVVGAGDVG (KRAS G13D)
MVVLAADVQ

SEQ ID NO: 92189 - protein, 9 aa, synthetic construct
  source 1..9: note = Seed: VVVGAGDVG (KRAS G13D)
MVVLAADVR

SEQ ID NO: 92190 - protein, 9 aa, synthetic construct
  source 1..9: note = Seed: VVVGAGDVG (KRAS G13D)
MVVLAADVS

SEQ ID NO: 92191 - protein, 9 aa, synthetic construct
  source 1..9: note = Seed: VVVGAGDVG (KRAS G13D)
MVVLAADVT

SEQ ID NO: 92192 - protein, 9 aa, synthetic construct
  source 1..9: note = Seed: VVVGAGDVG (KRAS G13D)
MVVLAADVV

SEQ ID NO: 92193 - protein, 9 aa, synthetic construct
  source 1..9: note = Seed: VVVGAGDVG (KRAS G13D)
MVVLAADVY

SEQ ID NO: 92194 - protein, 9 aa, synthetic construct
  source 1..9: note = Seed: VVVGAGDVG (KRAS G13D)
MVVLADDVA

SEQ ID NO: 92195 - protein, 9 aa, synthetic construct
  source 1..9: note = Seed: VVVGAGDVG (KRAS G13D)
MVVLADDVF

SEQ ID NO: 92196 - protein, 9 aa, synthetic construct
  source 1..9: note = Seed: VVVGAGDVG (KRAS G13D)
MVVLADDVH

SEQ ID NO: 92197 - protein, 9 aa, synthetic construct
  source 1..9: note = Seed: VVVGAGDVG (KRAS G13D)
MVVLADDVI

SEQ ID NO: 92198 - protein, 9 aa, synthetic construct
  source 1..9: note = Seed: VVVGAGDVG (KRAS G13D)
MVVLADDVL

SEQ ID NO: 92199 - protein, 9 aa, synthetic construct
  source 1..9: note = Seed: VVVGAGDVG (KRAS G13D)
MVVLADDVM

SEQ ID NO: 92200 - protein, 9 aa, synthetic construct
  source 1..9: note = Seed: VVVGAGDVG (KRAS G13D)
MVVLADDVN

SEQ ID NO: 92201 - protein, 9 aa, synthetic construct
  source 1..9: note = Seed: VVVGAGDVG (KRAS G13D)
MVVLADDVS

SEQ ID NO: 92202 - protein, 9 aa, synthetic construct
  source 1..9: note = Seed: VVVGAGDVG (KRAS G13D)
MVVLADDVV

SEQ ID NO: 92203 - protein, 9 aa, synthetic construct
  source 1..9: note = Seed: VVVGAGDVG (KRAS G13D)
MVVLADDVY

SEQ ID NO: 92204 - protein, 9 aa, synthetic construct
  source 1..9: note = Seed: VVVGAGDVG (KRAS G13D)
MVVLAEDVA

SEQ ID NO: 92205 - protein, 9 aa, synthetic construct
  source 1..9: note = Seed: VVVGAGDVG (KRAS G13D)
MVVLAEDVG

SEQ ID NO: 92206 - protein, 9 aa, synthetic construct
  source 1..9: note = Seed: VVVGAGDVG (KRAS G13D)
MVVLAEDVM

SEQ ID NO: 92207 - protein, 9 aa, synthetic construct
  source 1..9: note = Seed: VVVGAGDVG (KRAS G13D)
MVVLAEDVN

SEQ ID NO: 92208 - protein, 9 aa, synthetic construct
  source 1..9: note = Seed: VVVGAGDVG (KRAS G13D)
MVVLAEDVS

SEQ ID NO: 92209 - protein, 9 aa, synthetic construct
  source 1..9: note = Seed: VVVGAGDVG (KRAS G13D)
MVVLAEDVT

SEQ ID NO: 92210 - protein, 9 aa, synthetic construct
  source 1..9: note = Seed: VVVGAGDVG (KRAS G13D)
MVVLAGDVA

SEQ ID NO: 92211 - protein, 9 aa, synthetic construct
  source 1..9: note = Seed: VVVGAGDVG (KRAS G13D)
MVVLAGDVG

SEQ ID NO: 92212 - protein, 9 aa, synthetic construct
  source 1..9: note = Seed: VVVGAGDVG (KRAS G13D)
MVVLAGDVH

SEQ ID NO: 92213 - protein, 9 aa, synthetic construct
  source 1..9: note = Seed: VVVGAGDVG (KRAS G13D)
MVVLAGDVI

SEQ ID NO: 92214 - protein, 9 aa, synthetic construct
  source 1..9: note = Seed: VVVGAGDVG (KRAS G13D)
MVVLAGDVK

SEQ ID NO: 92215 - protein, 9 aa, synthetic construct
  source 1..9: note = Seed: VVVGAGDVG (KRAS G13D)
MVVLAGDVL

SEQ ID NO: 92216 - protein, 9 aa, synthetic construct
  source 1..9: note = Seed: VVVGAGDVG (KRAS G13D)
MVVLAGDVM

SEQ ID NO: 92217 - protein, 9 aa, synthetic construct
  source 1..9: note = Seed: VVVGAGDVG (KRAS G13D)
MVVLAGDVN

SEQ ID NO: 92218 - protein, 9 aa, synthetic construct
  source 1..9: note = Seed: VVVGAGDVG (KRAS G13D)
MVVLAGDVP

SEQ ID NO: 92219 - protein, 9 aa, synthetic construct
  source 1..9: note = Seed: VVVGAGDVG (KRAS G13D)
MVVLAGDVQ

SEQ ID NO: 92220 - protein, 9 aa, synthetic construct
  source 1..9: note = Seed: VVVGAGDVG (KRAS G13D)
MVVLAGDVR

SEQ ID NO: 92221 - protein, 9 aa, synthetic construct
  source 1..9: note = Seed: VVVGAGDVG (KRAS G13D)
MVVLAGDVS

SEQ ID NO: 92222 - protein, 9 aa, synthetic construct
  source 1..9: note = Seed: VVVGAGDVG (KRAS G13D)
MVVLAGDVT

SEQ ID NO: 92223 - protein, 9 aa, synthetic construct
  source 1..9: note = Seed: VVVGAGDVG (KRAS G13D)
MVVLAGDVV

SEQ ID NO: 92224 - protein, 9 aa, synthetic construct
  source 1..9: note = Seed: VVVGAGDVG (KRAS G13D)
MVVLAHDVA

SEQ ID NO: 92225 - protein, 9 aa, synthetic construct
  source 1..9: note = Seed: VVVGAGDVG (KRAS G13D)
MVVLAHDVC

SEQ ID NO: 92226 - protein, 9 aa, synthetic construct
  source 1..9: note = Seed: VVVGAGDVG (KRAS G13D)
MVVLAHDVG

SEQ ID NO: 92227 - protein, 9 aa, synthetic construct
  source 1..9: note = Seed: VVVGAGDVG (KRAS G13D)
MVVLAHDVH

SEQ ID NO: 92228 - protein, 9 aa, synthetic construct
  source 1..9: note = Seed: VVVGAGDVG (KRAS G13D)
MVVLAHDVI

SEQ ID NO: 92229 - protein, 9 aa, synthetic construct
  source 1..9: note = Seed: VVVGAGDVG (KRAS G13D)
MVVLAHDVL

SEQ ID NO: 92230 - protein, 9 aa, synthetic construct
  source 1..9: note = Seed: VVVGAGDVG (KRAS G13D)
MVVLAHDVM

SEQ ID NO: 92231 - protein, 9 aa, synthetic construct
  source 1..9: note = Seed: VVVGAGDVG (KRAS G13D)
MVVLAHDVN

SEQ ID NO: 92232 - protein, 9 aa, synthetic construct
  source 1..9: note = Seed: VVVGAGDVG (KRAS G13D)
MVVLAHDVQ

SEQ ID NO: 92233 - protein, 9 aa, synthetic construct
  source 1..9: note = Seed: VVVGAGDVG (KRAS G13D)
MVVLAHDVS

SEQ ID NO: 92234 - protein, 9 aa, synthetic construct
  source 1..9: note = Seed: VVVGAGDVG (KRAS G13D)
MVVLAHDVT

SEQ ID NO: 92235 - protein, 9 aa, synthetic construct
  source 1..9: note = Seed: VVVGAGDVG (KRAS G13D)
MVVLAHDVV

SEQ ID NO: 92236 - protein, 9 aa, synthetic construct
  source 1..9: note = Seed: VVVGAGDVG (KRAS G13D)
MVVLAIDVA

SEQ ID NO: 92237 - protein, 9 aa, synthetic construct
  source 1..9: note = Seed: VVVGAGDVG (KRAS G13D)
MVVLAIDVG

SEQ ID NO: 92238 - protein, 9 aa, synthetic construct
  source 1..9: note = Seed: VVVGAGDVG (KRAS G13D)
MVVLAIDVH

SEQ ID NO: 92239 - protein, 9 aa, synthetic construct
  source 1..9: note = Seed: VVVGAGDVG (KRAS G13D)
MVVLAIDVM

SEQ ID NO: 92240 - protein, 9 aa, synthetic construct
  source 1..9: note = Seed: VVVGAGDVG (KRAS G13D)
MVVLAIDVN

SEQ ID NO: 92241 - protein, 9 aa, synthetic construct
  source 1..9: note = Seed: VVVGAGDVG (KRAS G13D)
MVVLAIDVQ

SEQ ID NO: 92242 - protein, 9 aa, synthetic construct
  source 1..9: note = Seed: VVVGAGDVG (KRAS G13D)
MVVLAIDVS

SEQ ID NO: 92243 - protein, 9 aa, synthetic construct
  source 1..9: note = Seed: VVVGAGDVG (KRAS G13D)
MVVLAIDVT

SEQ ID NO: 92244 - protein, 9 aa, synthetic construct
  source 1..9: note = Seed: VVVGAGDVG (KRAS G13D)
MVVLAIDVY

SEQ ID NO: 92245 - protein, 9 aa, synthetic construct
  source 1..9: note = Seed: VVVGAGDVG (KRAS G13D)
MVVLAKDVA

SEQ ID NO: 92246 - protein, 9 aa, synthetic construct
  source 1..9: note = Seed: VVVGAGDVG (KRAS G13D)
MVVLAKDVN

SEQ ID NO: 92247 - protein, 9 aa, synthetic construct
  source 1..9: note = Seed: VVVGAGDVG (KRAS G13D)
MVVLAKDVQ

SEQ ID NO: 92248 - protein, 9 aa, synthetic construct
  source 1..9: note = Seed: VVVGAGDVG (KRAS G13D)
MVVLAKDVS

SEQ ID NO: 92249 - protein, 9 aa, synthetic construct
  source 1..9: note = Seed: VVVGAGDVG (KRAS G13D)
MVVLAKDVV

SEQ ID NO: 92250 - protein, 9 aa, synthetic construct
  source 1..9: note = Seed: VVVGAGDVG (KRAS G13D)
MVVLALDVA

SEQ ID NO: 92251 - protein, 9 aa, synthetic construct
  source 1..9: note = Seed: VVVGAGDVG (KRAS G13D)
MVVLALDVG

SEQ ID NO: 92252 - protein, 9 aa, synthetic construct
  source 1..9: note = Seed: VVVGAGDVG (KRAS G13D)
MVVLANDVA

SEQ ID NO: 92253 - protein, 9 aa, synthetic construct
  source 1..9: note = Seed: VVVGAGDVG (KRAS G13D)
MVVLANDVC

SEQ ID NO: 92254 - protein, 9 aa, synthetic construct
  source 1..9: note = Seed: VVVGAGDVG (KRAS G13D)
MVVLANDVD

SEQ ID NO: 92255 - protein, 9 aa, synthetic construct
  source 1..9: note = Seed: VVVGAGDVG (KRAS G13D)
MVVLANDVE

SEQ ID NO: 92256 - protein, 9 aa, synthetic construct
  source 1..9: note = Seed: VVVGAGDVG (KRAS G13D)
MVVLANDVF

SEQ ID NO: 92257 - protein, 9 aa, synthetic construct
  source 1..9: note = Seed: VVVGAGDVG (KRAS G13D)
MVVLANDVG

SEQ ID NO: 92258 - protein, 9 aa, synthetic construct
  source 1..9: note = Seed: VVVGAGDVG (KRAS G13D)
MVVLANDVH

SEQ ID NO: 92259 - protein, 9 aa, synthetic construct
  source 1..9: note = Seed: VVVGAGDVG (KRAS G13D)
MVVLANDVI

SEQ ID NO: 92260 - protein, 9 aa, synthetic construct
  source 1..9: note = Seed: VVVGAGDVG (KRAS G13D)
MVVLANDVL

SEQ ID NO: 92261 - protein, 9 aa, synthetic construct
  source 1..9: note = Seed: VVVGAGDVG (KRAS G13D)
MVVLANDVM

SEQ ID NO: 92262 - protein, 9 aa, synthetic construct
  source 1..9: note = Seed: VVVGAGDVG (KRAS G13D)
MVVLANDVN

SEQ ID NO: 92263 - protein, 9 aa, synthetic construct
  source 1..9: note = Seed: VVVGAGDVG (KRAS G13D)
MVVLANDVP

SEQ ID NO: 92264 - protein, 9 aa, synthetic construct
  source 1..9: note = Seed: VVVGAGDVG (KRAS G13D)
MVVLANDVQ

SEQ ID NO: 92265 - protein, 9 aa, synthetic construct
  source 1..9: note = Seed: VVVGAGDVG (KRAS G13D)
MVVLANDVR

SEQ ID NO: 92266 - protein, 9 aa, synthetic construct
  source 1..9: note = Seed: VVVGAGDVG (KRAS G13D)
MVVLANDVS

SEQ ID NO: 92267 - protein, 9 aa, synthetic construct
  source 1..9: note = Seed: VVVGAGDVG (KRAS G13D)
MVVLANDVT

SEQ ID NO: 92268 - protein, 9 aa, synthetic construct
  source 1..9: note = Seed: VVVGAGDVG (KRAS G13D)
MVVLANDVV

SEQ ID NO: 92269 - protein, 9 aa, synthetic construct
  source 1..9: note = Seed: VVVGAGDVG (KRAS G13D)
MVVLANDVW

SEQ ID NO: 92270 - protein, 9 aa, synthetic construct
  source 1..9: note = Seed: VVVGAGDVG (KRAS G13D)
MVVLANDVY

SEQ ID NO: 92271 - protein, 9 aa, synthetic construct
  source 1..9: note = Seed: VVVGAGDVG (KRAS G13D)
MVVLAPDVA

SEQ ID NO: 92272 - protein, 9 aa, synthetic construct
  source 1..9: note = Seed: VVVGAGDVG (KRAS G13D)
MVVLAPDVC

SEQ ID NO: 92273 - protein, 9 aa, synthetic construct
  source 1..9: note = Seed: VVVGAGDVG (KRAS G13D)
MVVLAPDVD

SEQ ID NO: 92274 - protein, 9 aa, synthetic construct
  source 1..9: note = Seed: VVVGAGDVG (KRAS G13D)
MVVLAPDVE

SEQ ID NO: 92275 - protein, 9 aa, synthetic construct
  source 1..9: note = Seed: VVVGAGDVG (KRAS G13D)
MVVLAPDVF

SEQ ID NO: 92276 - protein, 9 aa, synthetic construct
  source 1..9: note = Seed: VVVGAGDVG (KRAS G13D)
MVVLAPDVG

SEQ ID NO: 92277 - protein, 9 aa, synthetic construct
  source 1..9: note = Seed: VVVGAGDVG (KRAS G13D)
MVVLAPDVH

SEQ ID NO: 92278 - protein, 9 aa, synthetic construct
  source 1..9: note = Seed: VVVGAGDVG (KRAS G13D)
MVVLAPDVI

SEQ ID NO: 92279 - protein, 9 aa, synthetic construct
  source 1..9: note = Seed: VVVGAGDVG (KRAS G13D)
MVVLAPDVK

SEQ ID NO: 92280 - protein, 9 aa, synthetic construct
  source 1..9: note = Seed: VVVGAGDVG (KRAS G13D)
MVVLAPDVL

SEQ ID NO: 92281 - protein, 9 aa, synthetic construct
  source 1..9: note = Seed: VVVGAGDVG (KRAS G13D)
MVVLAPDVM

SEQ ID NO: 92282 - protein, 9 aa, synthetic construct
  source 1..9: note = Seed: VVVGAGDVG (KRAS G13D)
MVVLAPDVN

SEQ ID NO: 92283 - protein, 9 aa, synthetic construct
  source 1..9: note = Seed: VVVGAGDVG (KRAS G13D)
MVVLAPDVP

SEQ ID NO: 92284 - protein, 9 aa, synthetic construct
  source 1..9: note = Seed: VVVGAGDVG (KRAS G13D)
MVVLAPDVQ

SEQ ID NO: 92285 - protein, 9 aa, synthetic construct
  source 1..9: note = Seed: VVVGAGDVG (KRAS G13D)
MVVLAPDVR

SEQ ID NO: 92286 - protein, 9 aa, synthetic construct
  source 1..9: note = Seed: VVVGAGDVG (KRAS G13D)
MVVLAPDVS

SEQ ID NO: 92287 - protein, 9 aa, synthetic construct
  source 1..9: note = Seed: VVVGAGDVG (KRAS G13D)
MVVLAPDVT

SEQ ID NO: 92288 - protein, 9 aa, synthetic construct
  source 1..9: note = Seed: VVVGAGDVG (KRAS G13D)
MVVLAPDVV

SEQ ID NO: 92289 - protein, 9 aa, synthetic construct
  source 1..9: note = Seed: VVVGAGDVG (KRAS G13D)
MVVLAPDVW

SEQ ID NO: 92290 - protein, 9 aa, synthetic construct
  source 1..9: note = Seed: VVVGAGDVG (KRAS G13D)
MVVLAPDVY

SEQ ID NO: 92291 - protein, 9 aa, synthetic construct
  source 1..9: note = Seed: VVVGAGDVG (KRAS G13D)
MVVLAQDVS

SEQ ID NO: 92292 - protein, 9 aa, synthetic construct
  source 1..9: note = Seed: VVVGAGDVG (KRAS G13D)
MVVLARDVA

SEQ ID NO: 92293 - protein, 9 aa, synthetic construct
  source 1..9: note = Seed: VVVGAGDVG (KRAS G13D)
MVVLARDVG

SEQ ID NO: 92294 - protein, 9 aa, synthetic construct
  source 1..9: note = Seed: VVVGAGDVG (KRAS G13D)
MVVLASDVA

SEQ ID NO: 92295 - protein, 9 aa, synthetic construct
  source 1..9: note = Seed: VVVGAGDVG (KRAS G13D)
MVVLASDVD

SEQ ID NO: 92296 - protein, 9 aa, synthetic construct
  source 1..9: note = Seed: VVVGAGDVG (KRAS G13D)
MVVLASDVE

SEQ ID NO: 92297 - protein, 9 aa, synthetic construct
  source 1..9: note = Seed: VVVGAGDVG (KRAS G13D)
MVVLASDVF

SEQ ID NO: 92298 - protein, 9 aa, synthetic construct
  source 1..9: note = Seed: VVVGAGDVG (KRAS G13D)
MVVLASDVG

SEQ ID NO: 92299 - protein, 9 aa, synthetic construct
  source 1..9: note = Seed: VVVGAGDVG (KRAS G13D)
MVVLASDVH

SEQ ID NO: 92300 - protein, 9 aa, synthetic construct
  source 1..9: note = Seed: VVVGAGDVG (KRAS G13D)
MVVLASDVI

SEQ ID NO: 92301 - protein, 9 aa, synthetic construct
  source 1..9: note = Seed: VVVGAGDVG (KRAS G13D)
MVVLASDVK

SEQ ID NO: 92302 - protein, 9 aa, synthetic construct
  source 1..9: note = Seed: VVVGAGDVG (KRAS G13D)
MVVLASDVL

SEQ ID NO: 92303 - protein, 9 aa, synthetic construct
  source 1..9: note = Seed: VVVGAGDVG (KRAS G13D)
MVVLASDVM

SEQ ID NO: 92304 - protein, 9 aa, synthetic construct
  source 1..9: note = Seed: VVVGAGDVG (KRAS G13D)
MVVLASDVN

SEQ ID NO: 92305 - protein, 9 aa, synthetic construct
  source 1..9: note = Seed: VVVGAGDVG (KRAS G13D)
MVVLASDVP

SEQ ID NO: 92306 - protein, 9 aa, synthetic construct
  source 1..9: note = Seed: VVVGAGDVG (KRAS G13D)
MVVLASDVQ

SEQ ID NO: 92307 - protein, 9 aa, synthetic construct
  source 1..9: note = Seed: VVVGAGDVG (KRAS G13D)
MVVLASDVR

SEQ ID NO: 92308 - protein, 9 aa, synthetic construct
  source 1..9: note = Seed: VVVGAGDVG (KRAS G13D)
MVVLASDVS

SEQ ID NO: 92309 - protein, 9 aa, synthetic construct
  source 1..9: note = Seed: VVVGAGDVG (KRAS G13D)
MVVLASDVT

SEQ ID NO: 92310 - protein, 9 aa, synthetic construct
  source 1..9: note = Seed: VVVGAGDVG (KRAS G13D)
MVVLASDVV

SEQ ID NO: 92311 - protein, 9 aa, synthetic construct
  source 1..9: note = Seed: VVVGAGDVG (KRAS G13D)
MVVLASDVY

SEQ ID NO: 92312 - protein, 9 aa, synthetic construct
  source 1..9: note = Seed: VVVGAGDVG (KRAS G13D)
MVVLATDVA

SEQ ID NO: 92313 - protein, 9 aa, synthetic construct
  source 1..9: note = Seed: VVVGAGDVG (KRAS G13D)
MVVLATDVD

SEQ ID NO: 92314 - protein, 9 aa, synthetic construct
  source 1..9: note = Seed: VVVGAGDVG (KRAS G13D)
MVVLATDVE

SEQ ID NO: 92315 - protein, 9 aa, synthetic construct
  source 1..9: note = Seed: VVVGAGDVG (KRAS G13D)
MVVLATDVG

SEQ ID NO: 92316 - protein, 9 aa, synthetic construct
  source 1..9: note = Seed: VVVGAGDVG (KRAS G13D)
MVVLATDVH

SEQ ID NO: 92317 - protein, 9 aa, synthetic construct
  source 1..9: note = Seed: VVVGAGDVG (KRAS G13D)
MVVLATDVI

SEQ ID NO: 92318 - protein, 9 aa, synthetic construct
  source 1..9: note = Seed: VVVGAGDVG (KRAS G13D)
MVVLATDVK

SEQ ID NO: 92319 - protein, 9 aa, synthetic construct
  source 1..9: note = Seed: VVVGAGDVG (KRAS G13D)
MVVLATDVL

SEQ ID NO: 92320 - protein, 9 aa, synthetic construct
  source 1..9: note = Seed: VVVGAGDVG (KRAS G13D)
MVVLATDVM

SEQ ID NO: 92321 - protein, 9 aa, synthetic construct
  source 1..9: note = Seed: VVVGAGDVG (KRAS G13D)
MVVLATDVN

SEQ ID NO: 92322 - protein, 9 aa, synthetic construct
  source 1..9: note = Seed: VVVGAGDVG (KRAS G13D)
MVVLATDVP

SEQ ID NO: 92323 - protein, 9 aa, synthetic construct
  source 1..9: note = Seed: VVVGAGDVG (KRAS G13D)
MVVLATDVQ

SEQ ID NO: 92324 - protein, 9 aa, synthetic construct
  source 1..9: note = Seed: VVVGAGDVG (KRAS G13D)
MVVLATDVR

SEQ ID NO: 92325 - protein, 9 aa, synthetic construct
  source 1..9: note = Seed: VVVGAGDVG (KRAS G13D)
MVVLATDVS

SEQ ID NO: 92326 - protein, 9 aa, synthetic construct
  source 1..9: note = Seed: VVVGAGDVG (KRAS G13D)
MVVLATDVT

SEQ ID NO: 92327 - protein, 9 aa, synthetic construct
  source 1..9: note = Seed: VVVGAGDVG (KRAS G13D)
MVVLATDVV

SEQ ID NO: 92328 - protein, 9 aa, synthetic construct
  source 1..9: note = Seed: VVVGAGDVG (KRAS G13D)
MVVLATDVY

SEQ ID NO: 92329 - protein, 9 aa, synthetic construct
  source 1..9: note = Seed: VVVGAGDVG (KRAS G13D)
MVVLAVDVA

SEQ ID NO: 92330 - protein, 9 aa, synthetic construct
  source 1..9: note = Seed: VVVGAGDVG (KRAS G13D)
MVVLAVDVE

SEQ ID NO: 92331 - protein, 9 aa, synthetic construct
  source 1..9: note = Seed: VVVGAGDVG (KRAS G13D)
MVVLAVDVG

SEQ ID NO: 92332 - protein, 9 aa, synthetic construct
  source 1..9: note = Seed: VVVGAGDVG (KRAS G13D)
MVVLAVDVH

SEQ ID NO: 92333 - protein, 9 aa, synthetic construct
  source 1..9: note = Seed: VVVGAGDVG (KRAS G13D)
MVVLAVDVK

SEQ ID NO: 92334 - protein, 9 aa, synthetic construct
  source 1..9: note = Seed: VVVGAGDVG (KRAS G13D)
MVVLAVDVM

SEQ ID NO: 92335 - protein, 9 aa, synthetic construct
  source 1..9: note = Seed: VVVGAGDVG (KRAS G13D)
MVVLAVDVN

SEQ ID NO: 92336 - protein, 9 aa, synthetic construct
  source 1..9: note = Seed: VVVGAGDVG (KRAS G13D)
MVVLAVDVP

SEQ ID NO: 92337 - protein, 9 aa, synthetic construct
  source 1..9: note = Seed: VVVGAGDVG (KRAS G13D)
MVVLAVDVQ

SEQ ID NO: 92338 - protein, 9 aa, synthetic construct
  source 1..9: note = Seed: VVVGAGDVG (KRAS G13D)
MVVLAVDVR

SEQ ID NO: 92339 - protein, 9 aa, synthetic construct
  source 1..9: note = Seed: VVVGAGDVG (KRAS G13D)
MVVLAVDVS

SEQ ID NO: 92340 - protein, 9 aa, synthetic construct
  source 1..9: note = Seed: VVVGAGDVG (KRAS G13D)
MVVLAVDVT

SEQ ID NO: 92341 - protein, 9 aa, synthetic construct
  source 1..9: note = Seed: VVVGAGDVG (KRAS G13D)
MVVLAVDVV

SEQ ID NO: 92342 - protein, 9 aa, synthetic construct
  source 1..9: note = Seed: VVVGAGDVG (KRAS G13D)
MVVMAADVA

SEQ ID NO: 92343 - protein, 9 aa, synthetic construct
  source 1..9: note = Seed: VVVGAGDVG (KRAS G13D)
MVVMAADVC

SEQ ID NO: 92344 - protein, 9 aa, synthetic construct
  source 1..9: note = Seed: VVVGAGDVG (KRAS G13D)
MVVMAADVD

SEQ ID NO: 92345 - protein, 9 aa, synthetic construct
  source 1..9: note = Seed: VVVGAGDVG (KRAS G13D)
MVVMAADVE

SEQ ID NO: 92346 - protein, 9 aa, synthetic construct
  source 1..9: note = Seed: VVVGAGDVG (KRAS G13D)
MVVMAADVF

SEQ ID NO: 92347 - protein, 9 aa, synthetic construct
  source 1..9: note = Seed: VVVGAGDVG (KRAS G13D)
MVVMAADVG

SEQ ID NO: 92348 - protein, 9 aa, synthetic construct
  source 1..9: note = Seed: VVVGAGDVG (KRAS G13D)
MVVMAADVH

SEQ ID NO: 92349 - protein, 9 aa, synthetic construct
  source 1..9: note = Seed: VVVGAGDVG (KRAS G13D)
MVVMAADVI

SEQ ID NO: 92350 - protein, 9 aa, synthetic construct
  source 1..9: note = Seed: VVVGAGDVG (KRAS G13D)
MVVMAADVK

SEQ ID NO: 92351 - protein, 9 aa, synthetic construct
  source 1..9: note = Seed: VVVGAGDVG (KRAS G13D)
MVVMAADVL

SEQ ID NO: 92352 - protein, 9 aa, synthetic construct
  source 1..9: note = Seed: VVVGAGDVG (KRAS G13D)
MVVMAADVM

SEQ ID NO: 92353 - protein, 9 aa, synthetic construct
  source 1..9: note = Seed: VVVGAGDVG (KRAS G13D)
MVVMAADVN

SEQ ID NO: 92354 - protein, 9 aa, synthetic construct
  source 1..9: note = Seed: VVVGAGDVG (KRAS G13D)
MVVMAADVP

SEQ ID NO: 92355 - protein, 9 aa, synthetic construct
  source 1..9: note = Seed: VVVGAGDVG (KRAS G13D)
MVVMAADVQ

SEQ ID NO: 92356 - protein, 9 aa, synthetic construct
  source 1..9: note = Seed: VVVGAGDVG (KRAS G13D)
MVVMAADVR

SEQ ID NO: 92357 - protein, 9 aa, synthetic construct
  source 1..9: note = Seed: VVVGAGDVG (KRAS G13D)
MVVMAADVS

SEQ ID NO: 92358 - protein, 9 aa, synthetic construct
  source 1..9: note = Seed: VVVGAGDVG (KRAS G13D)
MVVMAADVT

SEQ ID NO: 92359 - protein, 9 aa, synthetic construct
  source 1..9: note = Seed: VVVGAGDVG (KRAS G13D)
MVVMAADVV

SEQ ID NO: 92360 - protein, 9 aa, synthetic construct
  source 1..9: note = Seed: VVVGAGDVG (KRAS G13D)
MVVMAADVY

SEQ ID NO: 92361 - protein, 9 aa, synthetic construct
  source 1..9: note = Seed: VVVGAGDVG (KRAS G13D)
MVVMADDVA

SEQ ID NO: 92362 - protein, 9 aa, synthetic construct
  source 1..9: note = Seed: VVVGAGDVG (KRAS G13D)
MVVMADDVF

SEQ ID NO: 92363 - protein, 9 aa, synthetic construct
  source 1..9: note = Seed: VVVGAGDVG (KRAS G13D)
MVVMADDVG

SEQ ID NO: 92364 - protein, 9 aa, synthetic construct
  source 1..9: note = Seed: VVVGAGDVG (KRAS G13D)
MVVMADDVH

SEQ ID NO: 92365 - protein, 9 aa, synthetic construct
  source 1..9: note = Seed: VVVGAGDVG (KRAS G13D)
MVVMADDVI

SEQ ID NO: 92366 - protein, 9 aa, synthetic construct
  source 1..9: note = Seed: VVVGAGDVG (KRAS G13D)
MVVMADDVL

SEQ ID NO: 92367 - protein, 9 aa, synthetic construct
  source 1..9: note = Seed: VVVGAGDVG (KRAS G13D)
MVVMADDVM

SEQ ID NO: 92368 - protein, 9 aa, synthetic construct
  source 1..9: note = Seed: VVVGAGDVG (KRAS G13D)
MVVMADDVN

SEQ ID NO: 92369 - protein, 9 aa, synthetic construct
  source 1..9: note = Seed: VVVGAGDVG (KRAS G13D)
MVVMADDVP

SEQ ID NO: 92370 - protein, 9 aa, synthetic construct
  source 1..9: note = Seed: VVVGAGDVG (KRAS G13D)
MVVMADDVQ

SEQ ID NO: 92371 - protein, 9 aa, synthetic construct
  source 1..9: note = Seed: VVVGAGDVG (KRAS G13D)
MVVMADDVS

SEQ ID NO: 92372 - protein, 9 aa, synthetic construct
  source 1..9: note = Seed: VVVGAGDVG (KRAS G13D)
MVVMADDVT

SEQ ID NO: 92373 - protein, 9 aa, synthetic construct
  source 1..9: note = Seed: VVVGAGDVG (KRAS G13D)
MVVMADDVV

SEQ ID NO: 92374 - protein, 9 aa, synthetic construct
  source 1..9: note = Seed: VVVGAGDVG (KRAS G13D)
MVVMADDVW

SEQ ID NO: 92375 - protein, 9 aa, synthetic construct
  source 1..9: note = Seed: VVVGAGDVG (KRAS G13D)
MVVMADDVY

SEQ ID NO: 92376 - protein, 9 aa, synthetic construct
  source 1..9: note = Seed: VVVGAGDVG (KRAS G13D)
MVVMAEDVA

SEQ ID NO: 92377 - protein, 9 aa, synthetic construct
  source 1..9: note = Seed: VVVGAGDVG (KRAS G13D)
MVVMAEDVG

SEQ ID NO: 92378 - protein, 9 aa, synthetic construct
  source 1..9: note = Seed: VVVGAGDVG (KRAS G13D)
MVVMAEDVI

SEQ ID NO: 92379 - protein, 9 aa, synthetic construct
  source 1..9: note = Seed: VVVGAGDVG (KRAS G13D)
MVVMAEDVL

SEQ ID NO: 92380 - protein, 9 aa, synthetic construct
  source 1..9: note = Seed: VVVGAGDVG (KRAS G13D)
MVVMAEDVM

SEQ ID NO: 92381 - protein, 9 aa, synthetic construct
  source 1..9: note = Seed: VVVGAGDVG (KRAS G13D)
MVVMAEDVN

SEQ ID NO: 92382 - protein, 9 aa, synthetic construct
  source 1..9: note = Seed: VVVGAGDVG (KRAS G13D)
MVVMAEDVQ

SEQ ID NO: 92383 - protein, 9 aa, synthetic construct
  source 1..9: note = Seed: VVVGAGDVG (KRAS G13D)
MVVMAEDVS

SEQ ID NO: 92384 - protein, 9 aa, synthetic construct
  source 1..9: note = Seed: VVVGAGDVG (KRAS G13D)
MVVMAEDVT

SEQ ID NO: 92385 - protein, 9 aa, synthetic construct
  source 1..9: note = Seed: VVVGAGDVG (KRAS G13D)
MVVMAEDVV

SEQ ID NO: 92386 - protein, 9 aa, synthetic construct
  source 1..9: note = Seed: VVVGAGDVG (KRAS G13D)
MVVMAEDVY

SEQ ID NO: 92387 - protein, 9 aa, synthetic construct
  source 1..9: note = Seed: VVVGAGDVG (KRAS G13D)
MVVMAGDVA

SEQ ID NO: 92388 - protein, 9 aa, synthetic construct
  source 1..9: note = Seed: VVVGAGDVG (KRAS G13D)
MVVMAGDVE

SEQ ID NO: 92389 - protein, 9 aa, synthetic construct
  source 1..9: note = Seed: VVVGAGDVG (KRAS G13D)
MVVMAGDVF

SEQ ID NO: 92390 - protein, 9 aa, synthetic construct
  source 1..9: note = Seed: VVVGAGDVG (KRAS G13D)
MVVMAGDVG

SEQ ID NO: 92391 - protein, 9 aa, synthetic construct
  source 1..9: note = Seed: VVVGAGDVG (KRAS G13D)
MVVMAGDVH

SEQ ID NO: 92392 - protein, 9 aa, synthetic construct
  source 1..9: note = Seed: VVVGAGDVG (KRAS G13D)
MVVMAGDVI

SEQ ID NO: 92393 - protein, 9 aa, synthetic construct
  source 1..9: note = Seed: VVVGAGDVG (KRAS G13D)
MVVMAGDVK

SEQ ID NO: 92394 - protein, 9 aa, synthetic construct
  source 1..9: note = Seed: VVVGAGDVG (KRAS G13D)
MVVMAGDVL

SEQ ID NO: 92395 - protein, 9 aa, synthetic construct
  source 1..9: note = Seed: VVVGAGDVG (KRAS G13D)
MVVMAGDVM

SEQ ID NO: 92396 - protein, 9 aa, synthetic construct
  source 1..9: note = Seed: VVVGAGDVG (KRAS G13D)
MVVMAGDVN

SEQ ID NO: 92397 - protein, 9 aa, synthetic construct
  source 1..9: note = Seed: VVVGAGDVG (KRAS G13D)
MVVMAGDVP

SEQ ID NO: 92398 - protein, 9 aa, synthetic construct
  source 1..9: note = Seed: VVVGAGDVG (KRAS G13D)
MVVMAGDVQ

SEQ ID NO: 92399 - protein, 9 aa, synthetic construct
  source 1..9: note = Seed: VVVGAGDVG (KRAS G13D)
MVVMAGDVR

SEQ ID NO: 92400 - protein, 9 aa, synthetic construct
  source 1..9: note = Seed: VVVGAGDVG (KRAS G13D)
MVVMAGDVS

SEQ ID NO: 92401 - protein, 9 aa, synthetic construct
  source 1..9: note = Seed: VVVGAGDVG (KRAS G13D)
MVVMAGDVT

SEQ ID NO: 92402 - protein, 9 aa, synthetic construct
  source 1..9: note = Seed: VVVGAGDVG (KRAS G13D)
MVVMAGDVV

SEQ ID NO: 92403 - protein, 9 aa, synthetic construct
  source 1..9: note = Seed: VVVGAGDVG (KRAS G13D)
MVVMAHDVA

SEQ ID NO: 92404 - protein, 9 aa, synthetic construct
  source 1..9: note = Seed: VVVGAGDVG (KRAS G13D)
MVVMAHDVC

SEQ ID NO: 92405 - protein, 9 aa, synthetic construct
  source 1..9: note = Seed: VVVGAGDVG (KRAS G13D)
MVVMAHDVD

SEQ ID NO: 92406 - protein, 9 aa, synthetic construct
  source 1..9: note = Seed: VVVGAGDVG (KRAS G13D)
MVVMAHDVE

SEQ ID NO: 92407 - protein, 9 aa, synthetic construct
  source 1..9: note = Seed: VVVGAGDVG (KRAS G13D)
MVVMAHDVG

SEQ ID NO: 92408 - protein, 9 aa, synthetic construct
  source 1..9: note = Seed: VVVGAGDVG (KRAS G13D)
MVVMAHDVH

SEQ ID NO: 92409 - protein, 9 aa, synthetic construct
  source 1..9: note = Seed: VVVGAGDVG (KRAS G13D)
MVVMAHDVI

SEQ ID NO: 92410 - protein, 9 aa, synthetic construct
  source 1..9: note = Seed: VVVGAGDVG (KRAS G13D)
MVVMAHDVL

SEQ ID NO: 92411 - protein, 9 aa, synthetic construct
  source 1..9: note = Seed: VVVGAGDVG (KRAS G13D)
MVVMAHDVM

SEQ ID NO: 92412 - protein, 9 aa, synthetic construct
  source 1..9: note = Seed: VVVGAGDVG (KRAS G13D)
MVVMAHDVN

SEQ ID NO: 92413 - protein, 9 aa, synthetic construct
  source 1..9: note = Seed: VVVGAGDVG (KRAS G13D)
MVVMAHDVQ

SEQ ID NO: 92414 - protein, 9 aa, synthetic construct
  source 1..9: note = Seed: VVVGAGDVG (KRAS G13D)
MVVMAHDVS

SEQ ID NO: 92415 - protein, 9 aa, synthetic construct
  source 1..9: note = Seed: VVVGAGDVG (KRAS G13D)
MVVMAHDVT

SEQ ID NO: 92416 - protein, 9 aa, synthetic construct
  source 1..9: note = Seed: VVVGAGDVG (KRAS G13D)
MVVMAHDVV

SEQ ID NO: 92417 - protein, 9 aa, synthetic construct
  source 1..9: note = Seed: VVVGAGDVG (KRAS G13D)
MVVMAIDVA

SEQ ID NO: 92418 - protein, 9 aa, synthetic construct
  source 1..9: note = Seed: VVVGAGDVG (KRAS G13D)
MVVMAIDVD

SEQ ID NO: 92419 - protein, 9 aa, synthetic construct
  source 1..9: note = Seed: VVVGAGDVG (KRAS G13D)
MVVMAIDVE

SEQ ID NO: 92420 - protein, 9 aa, synthetic construct
  source 1..9: note = Seed: VVVGAGDVG (KRAS G13D)
MVVMAIDVG

SEQ ID NO: 92421 - protein, 9 aa, synthetic construct
  source 1..9: note = Seed: VVVGAGDVG (KRAS G13D)
MVVMAIDVH

SEQ ID NO: 92422 - protein, 9 aa, synthetic construct
  source 1..9: note = Seed: VVVGAGDVG (KRAS G13D)
MVVMAIDVI

SEQ ID NO: 92423 - protein, 9 aa, synthetic construct
  source 1..9: note = Seed: VVVGAGDVG (KRAS G13D)
MVVMAIDVK

SEQ ID NO: 92424 - protein, 9 aa, synthetic construct
  source 1..9: note = Seed: VVVGAGDVG (KRAS G13D)
MVVMAIDVL

SEQ ID NO: 92425 - protein, 9 aa, synthetic construct
  source 1..9: note = Seed: VVVGAGDVG (KRAS G13D)
MVVMAIDVM

SEQ ID NO: 92426 - protein, 9 aa, synthetic construct
  source 1..9: note = Seed: VVVGAGDVG (KRAS G13D)
MVVMAIDVN

SEQ ID NO: 92427 - protein, 9 aa, synthetic construct
  source 1..9: note = Seed: VVVGAGDVG (KRAS G13D)
MVVMAIDVQ

SEQ ID NO: 92428 - protein, 9 aa, synthetic construct
  source 1..9: note = Seed: VVVGAGDVG (KRAS G13D)
MVVMAIDVR

SEQ ID NO: 92429 - protein, 9 aa, synthetic construct
  source 1..9: note = Seed: VVVGAGDVG (KRAS G13D)
MVVMAIDVS

SEQ ID NO: 92430 - protein, 9 aa, synthetic construct
  source 1..9: note = Seed: VVVGAGDVG (KRAS G13D)
MVVMAIDVT

SEQ ID NO: 92431 - protein, 9 aa, synthetic construct
  source 1..9: note = Seed: VVVGAGDVG (KRAS G13D)
MVVMAIDVV

SEQ ID NO: 92432 - protein, 9 aa, synthetic construct
  source 1..9: note = Seed: VVVGAGDVG (KRAS G13D)
MVVMAIDVY

SEQ ID NO: 92433 - protein, 9 aa, synthetic construct
  source 1..9: note = Seed: VVVGAGDVG (KRAS G13D)
MVVMAKDVA

SEQ ID NO: 92434 - protein, 9 aa, synthetic construct
  source 1..9: note = Seed: VVVGAGDVG (KRAS G13D)
MVVMAKDVI

SEQ ID NO: 92435 - protein, 9 aa, synthetic construct
  source 1..9: note = Seed: VVVGAGDVG (KRAS G13D)
MVVMAKDVL

SEQ ID NO: 92436 - protein, 9 aa, synthetic construct
  source 1..9: note = Seed: VVVGAGDVG (KRAS G13D)
MVVMAKDVM

SEQ ID NO: 92437 - protein, 9 aa, synthetic construct
  source 1..9: note = Seed: VVVGAGDVG (KRAS G13D)
MVVMAKDVN

SEQ ID NO: 92438 - protein, 9 aa, synthetic construct
  source 1..9: note = Seed: VVVGAGDVG (KRAS G13D)
MVVMAKDVQ

SEQ ID NO: 92439 - protein, 9 aa, synthetic construct
  source 1..9: note = Seed: VVVGAGDVG (KRAS G13D)
MVVMAKDVS

SEQ ID NO: 92440 - protein, 9 aa, synthetic construct
  source 1..9: note = Seed: VVVGAGDVG (KRAS G13D)
MVVMAKDVT

SEQ ID NO: 92441 - protein, 9 aa, synthetic construct
  source 1..9: note = Seed: VVVGAGDVG (KRAS G13D)
MVVMAKDVV

SEQ ID NO: 92442 - protein, 9 aa, synthetic construct
  source 1..9: note = Seed: VVVGAGDVG (KRAS G13D)
MVVMALDVA

SEQ ID NO: 92443 - protein, 9 aa, synthetic construct
  source 1..9: note = Seed: VVVGAGDVG (KRAS G13D)
MVVMALDVC

SEQ ID NO: 92444 - protein, 9 aa, synthetic construct
  source 1..9: note = Seed: VVVGAGDVG (KRAS G13D)
MVVMALDVE

SEQ ID NO: 92445 - protein, 9 aa, synthetic construct
  source 1..9: note = Seed: VVVGAGDVG (KRAS G13D)
MVVMALDVG

SEQ ID NO: 92446 - protein, 9 aa, synthetic construct
  source 1..9: note = Seed: VVVGAGDVG (KRAS G13D)
MVVMALDVI

SEQ ID NO: 92447 - protein, 9 aa, synthetic construct
  source 1..9: note = Seed: VVVGAGDVG (KRAS G13D)
MVVMALDVL

SEQ ID NO: 92448 - protein, 9 aa, synthetic construct
  source 1..9: note = Seed: VVVGAGDVG (KRAS G13D)
MVVMALDVN

SEQ ID NO: 92449 - protein, 9 aa, synthetic construct
  source 1..9: note = Seed: VVVGAGDVG (KRAS G13D)
MVVMALDVQ

SEQ ID NO: 92450 - protein, 9 aa, synthetic construct
  source 1..9: note = Seed: VVVGAGDVG (KRAS G13D)
MVVMALDVS

SEQ ID NO: 92451 - protein, 9 aa, synthetic construct
  source 1..9: note = Seed: VVVGAGDVG (KRAS G13D)
MVVMALDVT

SEQ ID NO: 92452 - protein, 9 aa, synthetic construct
  source 1..9: note = Seed: VVVGAGDVG (KRAS G13D)
MVVMALDVV

SEQ ID NO: 92453 - protein, 9 aa, synthetic construct
  source 1..9: note = Seed: VVVGAGDVG (KRAS G13D)
MVVMALDVY

SEQ ID NO: 92454 - protein, 9 aa, synthetic construct
  source 1..9: note = Seed: VVVGAGDVG (KRAS G13D)
MVVMAMDVA

SEQ ID NO: 92455 - protein, 9 aa, synthetic construct
  source 1..9: note = Seed: VVVGAGDVG (KRAS G13D)
MVVMAMDVG

SEQ ID NO: 92456 - protein, 9 aa, synthetic construct
  source 1..9: note = Seed: VVVGAGDVG (KRAS G13D)
MVVMAMDVS

SEQ ID NO: 92457 - protein, 9 aa, synthetic construct
  source 1..9: note = Seed: VVVGAGDVG (KRAS G13D)
MVVMAMDVT

SEQ ID NO: 92458 - protein, 9 aa, synthetic construct
  source 1..9: note = Seed: VVVGAGDVG (KRAS G13D)
MVVMANDVA

SEQ ID NO: 92459 - protein, 9 aa, synthetic construct
  source 1..9: note = Seed: VVVGAGDVG (KRAS G13D)
MVVMANDVC

SEQ ID NO: 92460 - protein, 9 aa, synthetic construct
  source 1..9: note = Seed: VVVGAGDVG (KRAS G13D)
MVVMANDVD

SEQ ID NO: 92461 - protein, 9 aa, synthetic construct
  source 1..9: note = Seed: VVVGAGDVG (KRAS G13D)
MVVMANDVE

SEQ ID NO: 92462 - protein, 9 aa, synthetic construct
  source 1..9: note = Seed: VVVGAGDVG (KRAS G13D)
MVVMANDVF

SEQ ID NO: 92463 - protein, 9 aa, synthetic construct
  source 1..9: note = Seed: VVVGAGDVG (KRAS G13D)
MVVMANDVG

SEQ ID NO: 92464 - protein, 9 aa, synthetic construct
  source 1..9: note = Seed: VVVGAGDVG (KRAS G13D)
MVVMANDVH

SEQ ID NO: 92465 - protein, 9 aa, synthetic construct
  source 1..9: note = Seed: VVVGAGDVG (KRAS G13D)
MVVMANDVI

SEQ ID NO: 92466 - protein, 9 aa, synthetic construct
  source 1..9: note = Seed: VVVGAGDVG (KRAS G13D)
MVVMANDVK

SEQ ID NO: 92467 - protein, 9 aa, synthetic construct
  source 1..9: note = Seed: VVVGAGDVG (KRAS G13D)
MVVMANDVL

SEQ ID NO: 92468 - protein, 9 aa, synthetic construct
  source 1..9: note = Seed: VVVGAGDVG (KRAS G13D)
MVVMANDVM

SEQ ID NO: 92469 - protein, 9 aa, synthetic construct
  source 1..9: note = Seed: VVVGAGDVG (KRAS G13D)
MVVMANDVN

SEQ ID NO: 92470 - protein, 9 aa, synthetic construct
  source 1..9: note = Seed: VVVGAGDVG (KRAS G13D)
MVVMANDVP

SEQ ID NO: 92471 - protein, 9 aa, synthetic construct
  source 1..9: note = Seed: VVVGAGDVG (KRAS G13D)
MVVMANDVQ

SEQ ID NO: 92472 - protein, 9 aa, synthetic construct
  source 1..9: note = Seed: VVVGAGDVG (KRAS G13D)
MVVMANDVR

SEQ ID NO: 92473 - protein, 9 aa, synthetic construct
  source 1..9: note = Seed: VVVGAGDVG (KRAS G13D)
MVVMANDVS

SEQ ID NO: 92474 - protein, 9 aa, synthetic construct
  source 1..9: note = Seed: VVVGAGDVG (KRAS G13D)
MVVMANDVT

SEQ ID NO: 92475 - protein, 9 aa, synthetic construct
  source 1..9: note = Seed: VVVGAGDVG (KRAS G13D)
MVVMANDVV

SEQ ID NO: 92476 - protein, 9 aa, synthetic construct
  source 1..9: note = Seed: VVVGAGDVG (KRAS G13D)
MVVMANDVW

SEQ ID NO: 92477 - protein, 9 aa, synthetic construct
  source 1..9: note = Seed: VVVGAGDVG (KRAS G13D)
MVVMANDVY

SEQ ID NO: 92478 - protein, 9 aa, synthetic construct
  source 1..9: note = Seed: VVVGAGDVG (KRAS G13D)
MVVMAPDVA

SEQ ID NO: 92479 - protein, 9 aa, synthetic construct
  source 1..9: note = Seed: VVVGAGDVG (KRAS G13D)
MVVMAPDVC

SEQ ID NO: 92480 - protein, 9 aa, synthetic construct
  source 1..9: note = Seed: VVVGAGDVG (KRAS G13D)
MVVMAPDVD

SEQ ID NO: 92481 - protein, 9 aa, synthetic construct
  source 1..9: note = Seed: VVVGAGDVG (KRAS G13D)
MVVMAPDVE

SEQ ID NO: 92482 - protein, 9 aa, synthetic construct
  source 1..9: note = Seed: VVVGAGDVG (KRAS G13D)
MVVMAPDVF

SEQ ID NO: 92483 - protein, 9 aa, synthetic construct
  source 1..9: note = Seed: VVVGAGDVG (KRAS G13D)
MVVMAPDVG

SEQ ID NO: 92484 - protein, 9 aa, synthetic construct
  source 1..9: note = Seed: VVVGAGDVG (KRAS G13D)
MVVMAPDVH

SEQ ID NO: 92485 - protein, 9 aa, synthetic construct
  source 1..9: note = Seed: VVVGAGDVG (KRAS G13D)
MVVMAPDVI

SEQ ID NO: 92486 - protein, 9 aa, synthetic construct
  source 1..9: note = Seed: VVVGAGDVG (KRAS G13D)
MVVMAPDVK

SEQ ID NO: 92487 - protein, 9 aa, synthetic construct
  source 1..9: note = Seed: VVVGAGDVG (KRAS G13D)
MVVMAPDVL

SEQ ID NO: 92488 - protein, 9 aa, synthetic construct
  source 1..9: note = Seed: VVVGAGDVG (KRAS G13D)
MVVMAPDVM

SEQ ID NO: 92489 - protein, 9 aa, synthetic construct
  source 1..9: note = Seed: VVVGAGDVG (KRAS G13D)
MVVMAPDVN

SEQ ID NO: 92490 - protein, 9 aa, synthetic construct
  source 1..9: note = Seed: VVVGAGDVG (KRAS G13D)
MVVMAPDVP

SEQ ID NO: 92491 - protein, 9 aa, synthetic construct
  source 1..9: note = Seed: VVVGAGDVG (KRAS G13D)
MVVMAPDVQ

SEQ ID NO: 92492 - protein, 9 aa, synthetic construct
  source 1..9: note = Seed: VVVGAGDVG (KRAS G13D)
MVVMAPDVR

SEQ ID NO: 92493 - protein, 9 aa, synthetic construct
  source 1..9: note = Seed: VVVGAGDVG (KRAS G13D)
MVVMAPDVS

SEQ ID NO: 92494 - protein, 9 aa, synthetic construct
  source 1..9: note = Seed: VVVGAGDVG (KRAS G13D)
MVVMAPDVT

SEQ ID NO: 92495 - protein, 9 aa, synthetic construct
  source 1..9: note = Seed: VVVGAGDVG (KRAS G13D)
MVVMAPDVV

SEQ ID NO: 92496 - protein, 9 aa, synthetic construct
  source 1..9: note = Seed: VVVGAGDVG (KRAS G13D)
MVVMAPDVW

SEQ ID NO: 92497 - protein, 9 aa, synthetic construct
  source 1..9: note = Seed: VVVGAGDVG (KRAS G13D)
MVVMAPDVY

SEQ ID NO: 92498 - protein, 9 aa, synthetic construct
  source 1..9: note = Seed: VVVGAGDVG (KRAS G13D)
MVVMAQDVG

SEQ ID NO: 92499 - protein, 9 aa, synthetic construct
  source 1..9: note = Seed: VVVGAGDVG (KRAS G13D)
MVVMAQDVS

SEQ ID NO: 92500 - protein, 9 aa, synthetic construct
  source 1..9: note = Seed: VVVGAGDVG (KRAS G13D)
MVVMAQDVT

SEQ ID NO: 92501 - protein, 9 aa, synthetic construct
  source 1..9: note = Seed: VVVGAGDVG (KRAS G13D)
MVVMARDVA

SEQ ID NO: 92502 - protein, 9 aa, synthetic construct
  source 1..9: note = Seed: VVVGAGDVG (KRAS G13D)
MVVMARDVG

SEQ ID NO: 92503 - protein, 9 aa, synthetic construct
  source 1..9: note = Seed: VVVGAGDVG (KRAS G13D)
MVVMARDVH

SEQ ID NO: 92504 - protein, 9 aa, synthetic construct
  source 1..9: note = Seed: VVVGAGDVG (KRAS G13D)
MVVMARDVN

SEQ ID NO: 92505 - protein, 9 aa, synthetic construct
  source 1..9: note = Seed: VVVGAGDVG (KRAS G13D)
MVVMARDVS

SEQ ID NO: 92506 - protein, 9 aa, synthetic construct
  source 1..9: note = Seed: VVVGAGDVG (KRAS G13D)
MVVMASDVA

SEQ ID NO: 92507 - protein, 9 aa, synthetic construct
  source 1..9: note = Seed: VVVGAGDVG (KRAS G13D)
MVVMASDVC

SEQ ID NO: 92508 - protein, 9 aa, synthetic construct
  source 1..9: note = Seed: VVVGAGDVG (KRAS G13D)
MVVMASDVD

SEQ ID NO: 92509 - protein, 9 aa, synthetic construct
  source 1..9: note = Seed: VVVGAGDVG (KRAS G13D)
MVVMASDVE

SEQ ID NO: 92510 - protein, 9 aa, synthetic construct
  source 1..9: note = Seed: VVVGAGDVG (KRAS G13D)
MVVMASDVF

SEQ ID NO: 92511 - protein, 9 aa, synthetic construct
  source 1..9: note = Seed: VVVGAGDVG (KRAS G13D)
MVVMASDVG

SEQ ID NO: 92512 - protein, 9 aa, synthetic construct
  source 1..9: note = Seed: VVVGAGDVG (KRAS G13D)
MVVMASDVH

SEQ ID NO: 92513 - protein, 9 aa, synthetic construct
  source 1..9: note = Seed: VVVGAGDVG (KRAS G13D)
MVVMASDVI

SEQ ID NO: 92514 - protein, 9 aa, synthetic construct
  source 1..9: note = Seed: VVVGAGDVG (KRAS G13D)
MVVMASDVK

SEQ ID NO: 92515 - protein, 9 aa, synthetic construct
  source 1..9: note = Seed: VVVGAGDVG (KRAS G13D)
MVVMASDVL

SEQ ID NO: 92516 - protein, 9 aa, synthetic construct
  source 1..9: note = Seed: VVVGAGDVG (KRAS G13D)
MVVMASDVM

SEQ ID NO: 92517 - protein, 9 aa, synthetic construct
  source 1..9: note = Seed: VVVGAGDVG (KRAS G13D)
MVVMASDVN

SEQ ID NO: 92518 - protein, 9 aa, synthetic construct
  source 1..9: note = Seed: VVVGAGDVG (KRAS G13D)
MVVMASDVP

SEQ ID NO: 92519 - protein, 9 aa, synthetic construct
  source 1..9: note = Seed: VVVGAGDVG (KRAS G13D)
MVVMASDVQ

SEQ ID NO: 92520 - protein, 9 aa, synthetic construct
  source 1..9: note = Seed: VVVGAGDVG (KRAS G13D)
MVVMASDVR

SEQ ID NO: 92521 - protein, 9 aa, synthetic construct
  source 1..9: note = Seed: VVVGAGDVG (KRAS G13D)
MVVMASDVS

SEQ ID NO: 92522 - protein, 9 aa, synthetic construct
  source 1..9: note = Seed: VVVGAGDVG (KRAS G13D)
MVVMASDVT

SEQ ID NO: 92523 - protein, 9 aa, synthetic construct
  source 1..9: note = Seed: VVVGAGDVG (KRAS G13D)
MVVMASDVV

SEQ ID NO: 92524 - protein, 9 aa, synthetic construct
  source 1..9: note = Seed: VVVGAGDVG (KRAS G13D)
MVVMASDVW

SEQ ID NO: 92525 - protein, 9 aa, synthetic construct
  source 1..9: note = Seed: VVVGAGDVG (KRAS G13D)
MVVMASDVY

SEQ ID NO: 92526 - protein, 9 aa, synthetic construct
  source 1..9: note = Seed: VVVGAGDVG (KRAS G13D)
MVVMATDVA

SEQ ID NO: 92527 - protein, 9 aa, synthetic construct
  source 1..9: note = Seed: VVVGAGDVG (KRAS G13D)
MVVMATDVC

SEQ ID NO: 92528 - protein, 9 aa, synthetic construct
  source 1..9: note = Seed: VVVGAGDVG (KRAS G13D)
MVVMATDVD

SEQ ID NO: 92529 - protein, 9 aa, synthetic construct
  source 1..9: note = Seed: VVVGAGDVG (KRAS G13D)
MVVMATDVE

SEQ ID NO: 92530 - protein, 9 aa, synthetic construct
  source 1..9: note = Seed: VVVGAGDVG (KRAS G13D)
MVVMATDVF

SEQ ID NO: 92531 - protein, 9 aa, synthetic construct
  source 1..9: note = Seed: VVVGAGDVG (KRAS G13D)
MVVMATDVG

SEQ ID NO: 92532 - protein, 9 aa, synthetic construct
  source 1..9: note = Seed: VVVGAGDVG (KRAS G13D)
MVVMATDVH

SEQ ID NO: 92533 - protein, 9 aa, synthetic construct
  source 1..9: note = Seed: VVVGAGDVG (KRAS G13D)
MVVMATDVI

SEQ ID NO: 92534 - protein, 9 aa, synthetic construct
  source 1..9: note = Seed: VVVGAGDVG (KRAS G13D)
MVVMATDVK

SEQ ID NO: 92535 - protein, 9 aa, synthetic construct
  source 1..9: note = Seed: VVVGAGDVG (KRAS G13D)
MVVMATDVL

SEQ ID NO: 92536 - protein, 9 aa, synthetic construct
  source 1..9: note = Seed: VVVGAGDVG (KRAS G13D)
MVVMATDVM

SEQ ID NO: 92537 - protein, 9 aa, synthetic construct
  source 1..9: note = Seed: VVVGAGDVG (KRAS G13D)
MVVMATDVN

SEQ ID NO: 92538 - protein, 9 aa, synthetic construct
  source 1..9: note = Seed: VVVGAGDVG (KRAS G13D)
MVVMATDVP

SEQ ID NO: 92539 - protein, 9 aa, synthetic construct
  source 1..9: note = Seed: VVVGAGDVG (KRAS G13D)
MVVMATDVQ

SEQ ID NO: 92540 - protein, 9 aa, synthetic construct
  source 1..9: note = Seed: VVVGAGDVG (KRAS G13D)
MVVMATDVR

SEQ ID NO: 92541 - protein, 9 aa, synthetic construct
  source 1..9: note = Seed: VVVGAGDVG (KRAS G13D)
MVVMATDVS

SEQ ID NO: 92542 - protein, 9 aa, synthetic construct
  source 1..9: note = Seed: VVVGAGDVG (KRAS G13D)
MVVMATDVT

SEQ ID NO: 92543 - protein, 9 aa, synthetic construct
  source 1..9: note = Seed: VVVGAGDVG (KRAS G13D)
MVVMATDVV

SEQ ID NO: 92544 - protein, 9 aa, synthetic construct
  source 1..9: note = Seed: VVVGAGDVG (KRAS G13D)
MVVMATDVW

SEQ ID NO: 92545 - protein, 9 aa, synthetic construct
  source 1..9: note = Seed: VVVGAGDVG (KRAS G13D)
MVVMATDVY

SEQ ID NO: 92546 - protein, 9 aa, synthetic construct
  source 1..9: note = Seed: VVVGAGDVG (KRAS G13D)
MVVMAVDVA

SEQ ID NO: 92547 - protein, 9 aa, synthetic construct
  source 1..9: note = Seed: VVVGAGDVG (KRAS G13D)
MVVMAVDVD

SEQ ID NO: 92548 - protein, 9 aa, synthetic construct
  source 1..9: note = Seed: VVVGAGDVG (KRAS G13D)
MVVMAVDVE

SEQ ID NO: 92549 - protein, 9 aa, synthetic construct
  source 1..9: note = Seed: VVVGAGDVG (KRAS G13D)
MVVMAVDVG

SEQ ID NO: 92550 - protein, 9 aa, synthetic construct
  source 1..9: note = Seed: VVVGAGDVG (KRAS G13D)
MVVMAVDVH

SEQ ID NO: 92551 - protein, 9 aa, synthetic construct
  source 1..9: note = Seed: VVVGAGDVG (KRAS G13D)
MVVMAVDVI

SEQ ID NO: 92552 - protein, 9 aa, synthetic construct
  source 1..9: note = Seed: VVVGAGDVG (KRAS G13D)
MVVMAVDVK

SEQ ID NO: 92553 - protein, 9 aa, synthetic construct
  source 1..9: note = Seed: VVVGAGDVG (KRAS G13D)
MVVMAVDVL

SEQ ID NO: 92554 - protein, 9 aa, synthetic construct
  source 1..9: note = Seed: VVVGAGDVG (KRAS G13D)
MVVMAVDVM

SEQ ID NO: 92555 - protein, 9 aa, synthetic construct
  source 1..9: note = Seed: VVVGAGDVG (KRAS G13D)
MVVMAVDVN

SEQ ID NO: 92556 - protein, 9 aa, synthetic construct
  source 1..9: note = Seed: VVVGAGDVG (KRAS G13D)
MVVMAVDVP

SEQ ID NO: 92557 - protein, 9 aa, synthetic construct
  source 1..9: note = Seed: VVVGAGDVG (KRAS G13D)
MVVMAVDVQ

SEQ ID NO: 92558 - protein, 9 aa, synthetic construct
  source 1..9: note = Seed: VVVGAGDVG (KRAS G13D)
MVVMAVDVR

SEQ ID NO: 92559 - protein, 9 aa, synthetic construct
  source 1..9: note = Seed: VVVGAGDVG (KRAS G13D)
MVVMAVDVS

SEQ ID NO: 92560 - protein, 9 aa, synthetic construct
  source 1..9: note = Seed: VVVGAGDVG (KRAS G13D)
MVVMAVDVT

SEQ ID NO: 92561 - protein, 9 aa, synthetic construct
  source 1..9: note = Seed: VVVGAGDVG (KRAS G13D)
MVVMAVDVV

SEQ ID NO: 92562 - protein, 9 aa, synthetic construct
  source 1..9: note = Seed: VVVGAGDVG (KRAS G13D)
MVVMAVDVY

SEQ ID NO: 92563 - protein, 9 aa, synthetic construct
  source 1..9: note = Seed: VVVGAGDVG (KRAS G13D)
MVVMAYDVA

SEQ ID NO: 92564 - protein, 9 aa, synthetic construct
  source 1..9: note = Seed: VVVGAGDVG (KRAS G13D)
MVVNAADVA

SEQ ID NO: 92565 - protein, 9 aa, synthetic construct
  source 1..9: note = Seed: VVVGAGDVG (KRAS G13D)
MVVNAADVC

SEQ ID NO: 92566 - protein, 9 aa, synthetic construct
  source 1..9: note = Seed: VVVGAGDVG (KRAS G13D)
MVVNAADVD

SEQ ID NO: 92567 - protein, 9 aa, synthetic construct
  source 1..9: note = Seed: VVVGAGDVG (KRAS G13D)
MVVNAADVG

SEQ ID NO: 92568 - protein, 9 aa, synthetic construct
  source 1..9: note = Seed: VVVGAGDVG (KRAS G13D)
MVVNAADVI

SEQ ID NO: 92569 - protein, 9 aa, synthetic construct
  source 1..9: note = Seed: VVVGAGDVG (KRAS G13D)
MVVNAADVL

SEQ ID NO: 92570 - protein, 9 aa, synthetic construct
  source 1..9: note = Seed: VVVGAGDVG (KRAS G13D)
MVVNAADVM

SEQ ID NO: 92571 - protein, 9 aa, synthetic construct
  source 1..9: note = Seed: VVVGAGDVG (KRAS G13D)
MVVNAADVN

SEQ ID NO: 92572 - protein, 9 aa, synthetic construct
  source 1..9: note = Seed: VVVGAGDVG (KRAS G13D)
MVVNAADVQ

SEQ ID NO: 92573 - protein, 9 aa, synthetic construct
  source 1..9: note = Seed: VVVGAGDVG (KRAS G13D)
MVVNAADVS

SEQ ID NO: 92574 - protein, 9 aa, synthetic construct
  source 1..9: note = Seed: VVVGAGDVG (KRAS G13D)
MVVNAADVT

SEQ ID NO: 92575 - protein, 9 aa, synthetic construct
  source 1..9: note = Seed: VVVGAGDVG (KRAS G13D)
MVVNAADVV

SEQ ID NO: 92576 - protein, 9 aa, synthetic construct
  source 1..9: note = Seed: VVVGAGDVG (KRAS G13D)
MVVNADDVA

SEQ ID NO: 92577 - protein, 9 aa, synthetic construct
  source 1..9: note = Seed: VVVGAGDVG (KRAS G13D)
MVVNADDVS

SEQ ID NO: 92578 - protein, 9 aa, synthetic construct
  source 1..9: note = Seed: VVVGAGDVG (KRAS G13D)
MVVNAEDVL

SEQ ID NO: 92579 - protein, 9 aa, synthetic construct
  source 1..9: note = Seed: VVVGAGDVG (KRAS G13D)
MVVNAGDVA

SEQ ID NO: 92580 - protein, 9 aa, synthetic construct
  source 1..9: note = Seed: VVVGAGDVG (KRAS G13D)
MVVNAGDVI

SEQ ID NO: 92581 - protein, 9 aa, synthetic construct
  source 1..9: note = Seed: VVVGAGDVG (KRAS G13D)
MVVNAGDVM

SEQ ID NO: 92582 - protein, 9 aa, synthetic construct
  source 1..9: note = Seed: VVVGAGDVG (KRAS G13D)
MVVNAGDVN

SEQ ID NO: 92583 - protein, 9 aa, synthetic construct
  source 1..9: note = Seed: VVVGAGDVG (KRAS G13D)
MVVNAGDVQ

SEQ ID NO: 92584 - protein, 9 aa, synthetic construct
  source 1..9: note = Seed: VVVGAGDVG (KRAS G13D)
MVVNAGDVS

SEQ ID NO: 92585 - protein, 9 aa, synthetic construct
  source 1..9: note = Seed: VVVGAGDVG (KRAS G13D)
MVVNAGDVV

SEQ ID NO: 92586 - protein, 9 aa, synthetic construct
  source 1..9: note = Seed: VVVGAGDVG (KRAS G13D)
MVVNAIDVA

SEQ ID NO: 92587 - protein, 9 aa, synthetic construct
  source 1..9: note = Seed: VVVGAGDVG (KRAS G13D)
MVVNAIDVG

SEQ ID NO: 92588 - protein, 9 aa, synthetic construct
  source 1..9: note = Seed: VVVGAGDVG (KRAS G13D)
MVVNAIDVI

SEQ ID NO: 92589 - protein, 9 aa, synthetic construct
  source 1..9: note = Seed: VVVGAGDVG (KRAS G13D)
MVVNAIDVL

SEQ ID NO: 92590 - protein, 9 aa, synthetic construct
  source 1..9: note = Seed: VVVGAGDVG (KRAS G13D)
MVVNAIDVM

SEQ ID NO: 92591 - protein, 9 aa, synthetic construct
  source 1..9: note = Seed: VVVGAGDVG (KRAS G13D)
MVVNAIDVS

SEQ ID NO: 92592 - protein, 9 aa, synthetic construct
  source 1..9: note = Seed: VVVGAGDVG (KRAS G13D)
MVVNAIDVV

SEQ ID NO: 92593 - protein, 9 aa, synthetic construct
  source 1..9: note = Seed: VVVGAGDVG (KRAS G13D)
MVVNALDVA

SEQ ID NO: 92594 - protein, 9 aa, synthetic construct
  source 1..9: note = Seed: VVVGAGDVG (KRAS G13D)
MVVNALDVI

SEQ ID NO: 92595 - protein, 9 aa, synthetic construct
  source 1..9: note = Seed: VVVGAGDVG (KRAS G13D)
MVVNALDVL

SEQ ID NO: 92596 - protein, 9 aa, synthetic construct
  source 1..9: note = Seed: VVVGAGDVG (KRAS G13D)
MVVNALDVM

SEQ ID NO: 92597 - protein, 9 aa, synthetic construct
  source 1..9: note = Seed: VVVGAGDVG (KRAS G13D)
MVVNALDVQ

SEQ ID NO: 92598 - protein, 9 aa, synthetic construct
  source 1..9: note = Seed: VVVGAGDVG (KRAS G13D)
MVVNALDVS

SEQ ID NO: 92599 - protein, 9 aa, synthetic construct
  source 1..9: note = Seed: VVVGAGDVG (KRAS G13D)
MVVNALDVT

SEQ ID NO: 92600 - protein, 9 aa, synthetic construct
  source 1..9: note = Seed: VVVGAGDVG (KRAS G13D)
MVVNALDVV

SEQ ID NO: 92601 - protein, 9 aa, synthetic construct
  source 1..9: note = Seed: VVVGAGDVG (KRAS G13D)
MVVNAMDVI

SEQ ID NO: 92602 - protein, 9 aa, synthetic construct
  source 1..9: note = Seed: VVVGAGDVG (KRAS G13D)
MVVNAMDVL

SEQ ID NO: 92603 - protein, 9 aa, synthetic construct
  source 1..9: note = Seed: VVVGAGDVG (KRAS G13D)
MVVNAMDVM

SEQ ID NO: 92604 - protein, 9 aa, synthetic construct
  source 1..9: note = Seed: VVVGAGDVG (KRAS G13D)
MVVNAMDVV

SEQ ID NO: 92605 - protein, 9 aa, synthetic construct
  source 1..9: note = Seed: VVVGAGDVG (KRAS G13D)
MVVNANDVA

SEQ ID NO: 92606 - protein, 9 aa, synthetic construct
  source 1..9: note = Seed: VVVGAGDVG (KRAS G13D)
MVVNANDVC

SEQ ID NO: 92607 - protein, 9 aa, synthetic construct
  source 1..9: note = Seed: VVVGAGDVG (KRAS G13D)
MVVNANDVG

SEQ ID NO: 92608 - protein, 9 aa, synthetic construct
  source 1..9: note = Seed: VVVGAGDVG (KRAS G13D)
MVVNANDVH

SEQ ID NO: 92609 - protein, 9 aa, synthetic construct
  source 1..9: note = Seed: VVVGAGDVG (KRAS G13D)
MVVNANDVI

SEQ ID NO: 92610 - protein, 9 aa, synthetic construct
  source 1..9: note = Seed: VVVGAGDVG (KRAS G13D)
MVVNANDVL

SEQ ID NO: 92611 - protein, 9 aa, synthetic construct
  source 1..9: note = Seed: VVVGAGDVG (KRAS G13D)
MVVNANDVM

SEQ ID NO: 92612 - protein, 9 aa, synthetic construct
  source 1..9: note = Seed: VVVGAGDVG (KRAS G13D)
MVVNANDVN

SEQ ID NO: 92613 - protein, 9 aa, synthetic construct
  source 1..9: note = Seed: VVVGAGDVG (KRAS G13D)
MVVNANDVQ

SEQ ID NO: 92614 - protein, 9 aa, synthetic construct
  source 1..9: note = Seed: VVVGAGDVG (KRAS G13D)
MVVNANDVS

SEQ ID NO: 92615 - protein, 9 aa, synthetic construct
  source 1..9: note = Seed: VVVGAGDVG (KRAS G13D)
MVVNANDVT

SEQ ID NO: 92616 - protein, 9 aa, synthetic construct
  source 1..9: note = Seed: VVVGAGDVG (KRAS G13D)
MVVNANDVV

SEQ ID NO: 92617 - protein, 9 aa, synthetic construct
  source 1..9: note = Seed: VVVGAGDVG (KRAS G13D)
MVVNAPDVA

SEQ ID NO: 92618 - protein, 9 aa, synthetic construct
  source 1..9: note = Seed: VVVGAGDVG (KRAS G13D)
MVVNAPDVV

SEQ ID NO: 92619 - protein, 9 aa, synthetic construct
  source 1..9: note = Seed: VVVGAGDVG (KRAS G13D)
MVVNASDVA

SEQ ID NO: 92620 - protein, 9 aa, synthetic construct
  source 1..9: note = Seed: VVVGAGDVG (KRAS G13D)
MVVNASDVC

SEQ ID NO: 92621 - protein, 9 aa, synthetic construct
  source 1..9: note = Seed: VVVGAGDVG (KRAS G13D)
MVVNASDVG

SEQ ID NO: 92622 - protein, 9 aa, synthetic construct
  source 1..9: note = Seed: VVVGAGDVG (KRAS G13D)
MVVNASDVI

SEQ ID NO: 92623 - protein, 9 aa, synthetic construct
  source 1..9: note = Seed: VVVGAGDVG (KRAS G13D)
MVVNASDVL

SEQ ID NO: 92624 - protein, 9 aa, synthetic construct
  source 1..9: note = Seed: VVVGAGDVG (KRAS G13D)
MVVNASDVM

SEQ ID NO: 92625 - protein, 9 aa, synthetic construct
  source 1..9: note = Seed: VVVGAGDVG (KRAS G13D)
MVVNASDVN

SEQ ID NO: 92626 - protein, 9 aa, synthetic construct
  source 1..9: note = Seed: VVVGAGDVG (KRAS G13D)
MVVNASDVQ

SEQ ID NO: 92627 - protein, 9 aa, synthetic construct
  source 1..9: note = Seed: VVVGAGDVG (KRAS G13D)
MVVNASDVS

SEQ ID NO: 92628 - protein, 9 aa, synthetic construct
  source 1..9: note = Seed: VVVGAGDVG (KRAS G13D)
MVVNASDVT

SEQ ID NO: 92629 - protein, 9 aa, synthetic construct
  source 1..9: note = Seed: VVVGAGDVG (KRAS G13D)
MVVNASDVV

SEQ ID NO: 92630 - protein, 9 aa, synthetic construct
  source 1..9: note = Seed: VVVGAGDVG (KRAS G13D)
MVVNATDVA

SEQ ID NO: 92631 - protein, 9 aa, synthetic construct
  source 1..9: note = Seed: VVVGAGDVG (KRAS G13D)
MVVNATDVD

SEQ ID NO: 92632 - protein, 9 aa, synthetic construct
  source 1..9: note = Seed: VVVGAGDVG (KRAS G13D)
MVVNATDVG

SEQ ID NO: 92633 - protein, 9 aa, synthetic construct
  source 1..9: note = Seed: VVVGAGDVG (KRAS G13D)
MVVNATDVI

SEQ ID NO: 92634 - protein, 9 aa, synthetic construct
  source 1..9: note = Seed: VVVGAGDVG (KRAS G13D)
MVVNATDVL

SEQ ID NO: 92635 - protein, 9 aa, synthetic construct
  source 1..9: note = Seed: VVVGAGDVG (KRAS G13D)
MVVNATDVM

SEQ ID NO: 92636 - protein, 9 aa, synthetic construct
  source 1..9: note = Seed: VVVGAGDVG (KRAS G13D)
MVVNATDVN

SEQ ID NO: 92637 - protein, 9 aa, synthetic construct
  source 1..9: note = Seed: VVVGAGDVG (KRAS G13D)
MVVNATDVQ

SEQ ID NO: 92638 - protein, 9 aa, synthetic construct
  source 1..9: note = Seed: VVVGAGDVG (KRAS G13D)
MVVNATDVS

SEQ ID NO: 92639 - protein, 9 aa, synthetic construct
  source 1..9: note = Seed: VVVGAGDVG (KRAS G13D)
MVVNATDVT

SEQ ID NO: 92640 - protein, 9 aa, synthetic construct
  source 1..9: note = Seed: VVVGAGDVG (KRAS G13D)
MVVNATDVV

SEQ ID NO: 92641 - protein, 9 aa, synthetic construct
  source 1..9: note = Seed: VVVGAGDVG (KRAS G13D)
MVVNAVDVA

SEQ ID NO: 92642 - protein, 9 aa, synthetic construct
  source 1..9: note = Seed: VVVGAGDVG (KRAS G13D)
MVVNAVDVG

SEQ ID NO: 92643 - protein, 9 aa, synthetic construct
  source 1..9: note = Seed: VVVGAGDVG (KRAS G13D)
MVVNAVDVI

SEQ ID NO: 92644 - protein, 9 aa, synthetic construct
  source 1..9: note = Seed: VVVGAGDVG (KRAS G13D)
MVVNAVDVL

SEQ ID NO: 92645 - protein, 9 aa, synthetic construct
  source 1..9: note = Seed: VVVGAGDVG (KRAS G13D)
MVVNAVDVM

SEQ ID NO: 92646 - protein, 9 aa, synthetic construct
  source 1..9: note = Seed: VVVGAGDVG (KRAS G13D)
MVVNAVDVN

SEQ ID NO: 92647 - protein, 9 aa, synthetic construct
  source 1..9: note = Seed: VVVGAGDVG (KRAS G13D)
MVVNAVDVS

SEQ ID NO: 92648 - protein, 9 aa, synthetic construct
  source 1..9: note = Seed: VVVGAGDVG (KRAS G13D)
MVVNAVDVT

SEQ ID NO: 92649 - protein, 9 aa, synthetic construct
  source 1..9: note = Seed: VVVGAGDVG (KRAS G13D)
MVVNAVDVV

SEQ ID NO: 92650 - protein, 9 aa, synthetic construct
  source 1..9: note = Seed: VVVGAGDVG (KRAS G13D)
MVVPATDVA

SEQ ID NO: 92651 - protein, 9 aa, synthetic construct
  source 1..9: note = Seed: VVVGAGDVG (KRAS G13D)
MVVQAADVA

SEQ ID NO: 92652 - protein, 9 aa, synthetic construct
  source 1..9: note = Seed: VVVGAGDVG (KRAS G13D)
MVVQAADVC

SEQ ID NO: 92653 - protein, 9 aa, synthetic construct
  source 1..9: note = Seed: VVVGAGDVG (KRAS G13D)
MVVQAADVD

SEQ ID NO: 92654 - protein, 9 aa, synthetic construct
  source 1..9: note = Seed: VVVGAGDVG (KRAS G13D)
MVVQAADVE

SEQ ID NO: 92655 - protein, 9 aa, synthetic construct
  source 1..9: note = Seed: VVVGAGDVG (KRAS G13D)
MVVQAADVG

SEQ ID NO: 92656 - protein, 9 aa, synthetic construct
  source 1..9: note = Seed: VVVGAGDVG (KRAS G13D)
MVVQAADVH

SEQ ID NO: 92657 - protein, 9 aa, synthetic construct
  source 1..9: note = Seed: VVVGAGDVG (KRAS G13D)
MVVQAADVI

SEQ ID NO: 92658 - protein, 9 aa, synthetic construct
  source 1..9: note = Seed: VVVGAGDVG (KRAS G13D)
MVVQAADVL

SEQ ID NO: 92659 - protein, 9 aa, synthetic construct
  source 1..9: note = Seed: VVVGAGDVG (KRAS G13D)
MVVQAADVM

SEQ ID NO: 92660 - protein, 9 aa, synthetic construct
  source 1..9: note = Seed: VVVGAGDVG (KRAS G13D)
MVVQAADVN

SEQ ID NO: 92661 - protein, 9 aa, synthetic construct
  source 1..9: note = Seed: VVVGAGDVG (KRAS G13D)
MVVQAADVQ

SEQ ID NO: 92662 - protein, 9 aa, synthetic construct
  source 1..9: note = Seed: VVVGAGDVG (KRAS G13D)
MVVQAADVS

SEQ ID NO: 92663 - protein, 9 aa, synthetic construct
  source 1..9: note = Seed: VVVGAGDVG (KRAS G13D)
MVVQAADVT

SEQ ID NO: 92664 - protein, 9 aa, synthetic construct
  source 1..9: note = Seed: VVVGAGDVG (KRAS G13D)
MVVQAADVV

SEQ ID NO: 92665 - protein, 9 aa, synthetic construct
  source 1..9: note = Seed: VVVGAGDVG (KRAS G13D)
MVVQACDVA

SEQ ID NO: 92666 - protein, 9 aa, synthetic construct
  source 1..9: note = Seed: VVVGAGDVG (KRAS G13D)
MVVQADDVA

SEQ ID NO: 92667 - protein, 9 aa, synthetic construct
  source 1..9: note = Seed: VVVGAGDVG (KRAS G13D)
MVVQADDVI

SEQ ID NO: 92668 - protein, 9 aa, synthetic construct
  source 1..9: note = Seed: VVVGAGDVG (KRAS G13D)
MVVQADDVL

SEQ ID NO: 92669 - protein, 9 aa, synthetic construct
  source 1..9: note = Seed: VVVGAGDVG (KRAS G13D)
MVVQADDVM

SEQ ID NO: 92670 - protein, 9 aa, synthetic construct
  source 1..9: note = Seed: VVVGAGDVG (KRAS G13D)
MVVQADDVQ

SEQ ID NO: 92671 - protein, 9 aa, synthetic construct
  source 1..9: note = Seed: VVVGAGDVG (KRAS G13D)
MVVQADDVS

SEQ ID NO: 92672 - protein, 9 aa, synthetic construct
  source 1..9: note = Seed: VVVGAGDVG (KRAS G13D)
MVVQADDVT

SEQ ID NO: 92673 - protein, 9 aa, synthetic construct
  source 1..9: note = Seed: VVVGAGDVG (KRAS G13D)
MVVQADDVV

SEQ ID NO: 92674 - protein, 9 aa, synthetic construct
  source 1..9: note = Seed: VVVGAGDVG (KRAS G13D)
MVVQAEDVS

SEQ ID NO: 92675 - protein, 9 aa, synthetic construct
  source 1..9: note = Seed: VVVGAGDVG (KRAS G13D)
MVVQAGDVA

SEQ ID NO: 92676 - protein, 9 aa, synthetic construct
  source 1..9: note = Seed: VVVGAGDVG (KRAS G13D)
MVVQAGDVH

SEQ ID NO: 92677 - protein, 9 aa, synthetic construct
  source 1..9: note = Seed: VVVGAGDVG (KRAS G13D)
MVVQAGDVI

SEQ ID NO: 92678 - protein, 9 aa, synthetic construct
  source 1..9: note = Seed: VVVGAGDVG (KRAS G13D)
MVVQAGDVL

SEQ ID NO: 92679 - protein, 9 aa, synthetic construct
  source 1..9: note = Seed: VVVGAGDVG (KRAS G13D)
MVVQAGDVM

SEQ ID NO: 92680 - protein, 9 aa, synthetic construct
  source 1..9: note = Seed: VVVGAGDVG (KRAS G13D)
MVVQAGDVN

SEQ ID NO: 92681 - protein, 9 aa, synthetic construct
  source 1..9: note = Seed: VVVGAGDVG (KRAS G13D)
MVVQAGDVQ

SEQ ID NO: 92682 - protein, 9 aa, synthetic construct
  source 1..9: note = Seed: VVVGAGDVG (KRAS G13D)
MVVQAGDVS

SEQ ID NO: 92683 - protein, 9 aa, synthetic construct
  source 1..9: note = Seed: VVVGAGDVG (KRAS G13D)
MVVQAGDVT

SEQ ID NO: 92684 - protein, 9 aa, synthetic construct
  source 1..9: note = Seed: VVVGAGDVG (KRAS G13D)
MVVQAGDVV

SEQ ID NO: 92685 - protein, 9 aa, synthetic construct
  source 1..9: note = Seed: VVVGAGDVG (KRAS G13D)
MVVQAIDVA

SEQ ID NO: 92686 - protein, 9 aa, synthetic construct
  source 1..9: note = Seed: VVVGAGDVG (KRAS G13D)
MVVQAIDVC

SEQ ID NO: 92687 - protein, 9 aa, synthetic construct
  source 1..9: note = Seed: VVVGAGDVG (KRAS G13D)
MVVQAIDVG

SEQ ID NO: 92688 - protein, 9 aa, synthetic construct
  source 1..9: note = Seed: VVVGAGDVG (KRAS G13D)
MVVQAIDVI

SEQ ID NO: 92689 - protein, 9 aa, synthetic construct
  source 1..9: note = Seed: VVVGAGDVG (KRAS G13D)
MVVQAIDVM

SEQ ID NO: 92690 - protein, 9 aa, synthetic construct
  source 1..9: note = Seed: VVVGAGDVG (KRAS G13D)
MVVQAIDVN

SEQ ID NO: 92691 - protein, 9 aa, synthetic construct
  source 1..9: note = Seed: VVVGAGDVG (KRAS G13D)
MVVQAIDVQ

SEQ ID NO: 92692 - protein, 9 aa, synthetic construct
  source 1..9: note = Seed: VVVGAGDVG (KRAS G13D)
MVVQAIDVS

SEQ ID NO: 92693 - protein, 9 aa, synthetic construct
  source 1..9: note = Seed: VVVGAGDVG (KRAS G13D)
MVVQAIDVT

SEQ ID NO: 92694 - protein, 9 aa, synthetic construct
  source 1..9: note = Seed: VVVGAGDVG (KRAS G13D)
MVVQAIDVV

SEQ ID NO: 92695 - protein, 9 aa, synthetic construct
  source 1..9: note = Seed: VVVGAGDVG (KRAS G13D)
MVVQAIDVY

SEQ ID NO: 92696 - protein, 9 aa, synthetic construct
  source 1..9: note = Seed: VVVGAGDVG (KRAS G13D)
MVVQALDVA

SEQ ID NO: 92697 - protein, 9 aa, synthetic construct
  source 1..9: note = Seed: VVVGAGDVG (KRAS G13D)
MVVQALDVG

SEQ ID NO: 92698 - protein, 9 aa, synthetic construct
  source 1..9: note = Seed: VVVGAGDVG (KRAS G13D)
MVVQALDVI

SEQ ID NO: 92699 - protein, 9 aa, synthetic construct
  source 1..9: note = Seed: VVVGAGDVG (KRAS G13D)
MVVQALDVL

SEQ ID NO: 92700 - protein, 9 aa, synthetic construct
  source 1..9: note = Seed: VVVGAGDVG (KRAS G13D)
MVVQALDVM

SEQ ID NO: 92701 - protein, 9 aa, synthetic construct
  source 1..9: note = Seed: VVVGAGDVG (KRAS G13D)
MVVQALDVQ

SEQ ID NO: 92702 - protein, 9 aa, synthetic construct
  source 1..9: note = Seed: VVVGAGDVG (KRAS G13D)
MVVQALDVS

SEQ ID NO: 92703 - protein, 9 aa, synthetic construct
  source 1..9: note = Seed: VVVGAGDVG (KRAS G13D)
MVVQALDVV

SEQ ID NO: 92704 - protein, 9 aa, synthetic construct
  source 1..9: note = Seed: VVVGAGDVG (KRAS G13D)
MVVQALDVY

SEQ ID NO: 92705 - protein, 9 aa, synthetic construct
  source 1..9: note = Seed: VVVGAGDVG (KRAS G13D)
MVVQANDVA

SEQ ID NO: 92706 - protein, 9 aa, synthetic construct
  source 1..9: note = Seed: VVVGAGDVG (KRAS G13D)
MVVQANDVC

SEQ ID NO: 92707 - protein, 9 aa, synthetic construct
  source 1..9: note = Seed: VVVGAGDVG (KRAS G13D)
MVVQANDVE

SEQ ID NO: 92708 - protein, 9 aa, synthetic construct
  source 1..9: note = Seed: VVVGAGDVG (KRAS G13D)
MVVQANDVG

SEQ ID NO: 92709 - protein, 9 aa, synthetic construct
  source 1..9: note = Seed: VVVGAGDVG (KRAS G13D)
MVVQANDVH

SEQ ID NO: 92710 - protein, 9 aa, synthetic construct
  source 1..9: note = Seed: VVVGAGDVG (KRAS G13D)
MVVQANDVI

SEQ ID NO: 92711 - protein, 9 aa, synthetic construct
  source 1..9: note = Seed: VVVGAGDVG (KRAS G13D)
MVVQANDVL

SEQ ID NO: 92712 - protein, 9 aa, synthetic construct
  source 1..9: note = Seed: VVVGAGDVG (KRAS G13D)
MVVQANDVM

SEQ ID NO: 92713 - protein, 9 aa, synthetic construct
  source 1..9: note = Seed: VVVGAGDVG (KRAS G13D)
MVVQANDVN

SEQ ID NO: 92714 - protein, 9 aa, synthetic construct
  source 1..9: note = Seed: VVVGAGDVG (KRAS G13D)
MVVQANDVQ

SEQ ID NO: 92715 - protein, 9 aa, synthetic construct
  source 1..9: note = Seed: VVVGAGDVG (KRAS G13D)
MVVQANDVS

SEQ ID NO: 92716 - protein, 9 aa, synthetic construct
  source 1..9: note = Seed: VVVGAGDVG (KRAS G13D)
MVVQANDVT

SEQ ID NO: 92717 - protein, 9 aa, synthetic construct
  source 1..9: note = Seed: VVVGAGDVG (KRAS G13D)
MVVQANDVV

SEQ ID NO: 92718 - protein, 9 aa, synthetic construct
  source 1..9: note = Seed: VVVGAGDVG (KRAS G13D)
MVVQANDVY

SEQ ID NO: 92719 - protein, 9 aa, synthetic construct
  source 1..9: note = Seed: VVVGAGDVG (KRAS G13D)
MVVQAPDVA

SEQ ID NO: 92720 - protein, 9 aa, synthetic construct
  source 1..9: note = Seed: VVVGAGDVG (KRAS G13D)
MVVQAPDVG

SEQ ID NO: 92721 - protein, 9 aa, synthetic construct
  source 1..9: note = Seed: VVVGAGDVG (KRAS G13D)
MVVQAPDVH

SEQ ID NO: 92722 - protein, 9 aa, synthetic construct
  source 1..9: note = Seed: VVVGAGDVG (KRAS G13D)
MVVQAPDVI

SEQ ID NO: 92723 - protein, 9 aa, synthetic construct
  source 1..9: note = Seed: VVVGAGDVG (KRAS G13D)
MVVQAPDVL

SEQ ID NO: 92724 - protein, 9 aa, synthetic construct
  source 1..9: note = Seed: VVVGAGDVG (KRAS G13D)
MVVQAPDVM

SEQ ID NO: 92725 - protein, 9 aa, synthetic construct
  source 1..9: note = Seed: VVVGAGDVG (KRAS G13D)
MVVQAPDVN

SEQ ID NO: 92726 - protein, 9 aa, synthetic construct
  source 1..9: note = Seed: VVVGAGDVG (KRAS G13D)
MVVQAPDVQ

SEQ ID NO: 92727 - protein, 9 aa, synthetic construct
  source 1..9: note = Seed: VVVGAGDVG (KRAS G13D)
MVVQAPDVS

SEQ ID NO: 92728 - protein, 9 aa, synthetic construct
  source 1..9: note = Seed: VVVGAGDVG (KRAS G13D)
MVVQAPDVT

SEQ ID NO: 92729 - protein, 9 aa, synthetic construct
  source 1..9: note = Seed: VVVGAGDVG (KRAS G13D)
MVVQAPDVV

SEQ ID NO: 92730 - protein, 9 aa, synthetic construct
  source 1..9: note = Seed: VVVGAGDVG (KRAS G13D)
MVVQAPDVY

SEQ ID NO: 92731 - protein, 9 aa, synthetic construct
  source 1..9: note = Seed: VVVGAGDVG (KRAS G13D)
MVVQASDVA

SEQ ID NO: 92732 - protein, 9 aa, synthetic construct
  source 1..9: note = Seed: VVVGAGDVG (KRAS G13D)
MVVQASDVC

SEQ ID NO: 92733 - protein, 9 aa, synthetic construct
  source 1..9: note = Seed: VVVGAGDVG (KRAS G13D)
MVVQASDVD

SEQ ID NO: 92734 - protein, 9 aa, synthetic construct
  source 1..9: note = Seed: VVVGAGDVG (KRAS G13D)
MVVQASDVE

SEQ ID NO: 92735 - protein, 9 aa, synthetic construct
  source 1..9: note = Seed: VVVGAGDVG (KRAS G13D)
MVVQASDVG

SEQ ID NO: 92736 - protein, 9 aa, synthetic construct
  source 1..9: note = Seed: VVVGAGDVG (KRAS G13D)
MVVQASDVH

SEQ ID NO: 92737 - protein, 9 aa, synthetic construct
  source 1..9: note = Seed: VVVGAGDVG (KRAS G13D)
MVVQASDVI

SEQ ID NO: 92738 - protein, 9 aa, synthetic construct
  source 1..9: note = Seed: VVVGAGDVG (KRAS G13D)
MVVQASDVL

SEQ ID NO: 92739 - protein, 9 aa, synthetic construct
  source 1..9: note = Seed: VVVGAGDVG (KRAS G13D)
MVVQASDVM

SEQ ID NO: 92740 - protein, 9 aa, synthetic construct
  source 1..9: note = Seed: VVVGAGDVG (KRAS G13D)
MVVQASDVN

SEQ ID NO: 92741 - protein, 9 aa, synthetic construct
  source 1..9: note = Seed: VVVGAGDVG (KRAS G13D)
MVVQASDVQ

SEQ ID NO: 92742 - protein, 9 aa, synthetic construct
  source 1..9: note = Seed: VVVGAGDVG (KRAS G13D)
MVVQASDVS

SEQ ID NO: 92743 - protein, 9 aa, synthetic construct
  source 1..9: note = Seed: VVVGAGDVG (KRAS G13D)
MVVQASDVT

SEQ ID NO: 92744 - protein, 9 aa, synthetic construct
  source 1..9: note = Seed: VVVGAGDVG (KRAS G13D)
MVVQASDVV

SEQ ID NO: 92745 - protein, 9 aa, synthetic construct
  source 1..9: note = Seed: VVVGAGDVG (KRAS G13D)
MVVQATDVA

SEQ ID NO: 92746 - protein, 9 aa, synthetic construct
  source 1..9: note = Seed: VVVGAGDVG (KRAS G13D)
MVVQATDVC

SEQ ID NO: 92747 - protein, 9 aa, synthetic construct
  source 1..9: note = Seed: VVVGAGDVG (KRAS G13D)
MVVQATDVD

SEQ ID NO: 92748 - protein, 9 aa, synthetic construct
  source 1..9: note = Seed: VVVGAGDVG (KRAS G13D)
MVVQATDVE

SEQ ID NO: 92749 - protein, 9 aa, synthetic construct
  source 1..9: note = Seed: VVVGAGDVG (KRAS G13D)
MVVQATDVF

SEQ ID NO: 92750 - protein, 9 aa, synthetic construct
  source 1..9: note = Seed: VVVGAGDVG (KRAS G13D)
MVVQATDVG

SEQ ID NO: 92751 - protein, 9 aa, synthetic construct
  source 1..9: note = Seed: VVVGAGDVG (KRAS G13D)
MVVQATDVH

SEQ ID NO: 92752 - protein, 9 aa, synthetic construct
  source 1..9: note = Seed: VVVGAGDVG (KRAS G13D)
MVVQATDVI

SEQ ID NO: 92753 - protein, 9 aa, synthetic construct
  source 1..9: note = Seed: VVVGAGDVG (KRAS G13D)
MVVQATDVL

SEQ ID NO: 92754 - protein, 9 aa, synthetic construct
  source 1..9: note = Seed: VVVGAGDVG (KRAS G13D)
MVVQATDVM

SEQ ID NO: 92755 - protein, 9 aa, synthetic construct
  source 1..9: note = Seed: VVVGAGDVG (KRAS G13D)
MVVQATDVN

SEQ ID NO: 92756 - protein, 9 aa, synthetic construct
  source 1..9: note = Seed: VVVGAGDVG (KRAS G13D)
MVVQATDVQ

SEQ ID NO: 92757 - protein, 9 aa, synthetic construct
  source 1..9: note = Seed: VVVGAGDVG (KRAS G13D)
MVVQATDVR

SEQ ID NO: 92758 - protein, 9 aa, synthetic construct
  source 1..9: note = Seed: VVVGAGDVG (KRAS G13D)
MVVQATDVS

SEQ ID NO: 92759 - protein, 9 aa, synthetic construct
  source 1..9: note = Seed: VVVGAGDVG (KRAS G13D)
MVVQATDVT

SEQ ID NO: 92760 - protein, 9 aa, synthetic construct
  source 1..9: note = Seed: VVVGAGDVG (KRAS G13D)
MVVQATDVV

SEQ ID NO: 92761 - protein, 9 aa, synthetic construct
  source 1..9: note = Seed: VVVGAGDVG (KRAS G13D)
MVVQATDVY

SEQ ID NO: 92762 - protein, 9 aa, synthetic construct
  source 1..9: note = Seed: VVVGAGDVG (KRAS G13D)
MVVQAVDVA

SEQ ID NO: 92763 - protein, 9 aa, synthetic construct
  source 1..9: note = Seed: VVVGAGDVG (KRAS G13D)
MVVQAVDVD

SEQ ID NO: 92764 - protein, 9 aa, synthetic construct
  source 1..9: note = Seed: VVVGAGDVG (KRAS G13D)
MVVQAVDVG

SEQ ID NO: 92765 - protein, 9 aa, synthetic construct
  source 1..9: note = Seed: VVVGAGDVG (KRAS G13D)
MVVQAVDVH

SEQ ID NO: 92766 - protein, 9 aa, synthetic construct
  source 1..9: note = Seed: VVVGAGDVG (KRAS G13D)
MVVQAVDVI

SEQ ID NO: 92767 - protein, 9 aa, synthetic construct
  source 1..9: note = Seed: VVVGAGDVG (KRAS G13D)
MVVQAVDVK

SEQ ID NO: 92768 - protein, 9 aa, synthetic construct
  source 1..9: note = Seed: VVVGAGDVG (KRAS G13D)
MVVQAVDVL

SEQ ID NO: 92769 - protein, 9 aa, synthetic construct
  source 1..9: note = Seed: VVVGAGDVG (KRAS G13D)
MVVQAVDVM

SEQ ID NO: 92770 - protein, 9 aa, synthetic construct
  source 1..9: note = Seed: VVVGAGDVG (KRAS G13D)
MVVQAVDVN

SEQ ID NO: 92771 - protein, 9 aa, synthetic construct
  source 1..9: note = Seed: VVVGAGDVG (KRAS G13D)
MVVQAVDVQ

SEQ ID NO: 92772 - protein, 9 aa, synthetic construct
  source 1..9: note = Seed: VVVGAGDVG (KRAS G13D)
MVVQAVDVS

SEQ ID NO: 92773 - protein, 9 aa, synthetic construct
  source 1..9: note = Seed: VVVGAGDVG (KRAS G13D)
MVVQAVDVT

SEQ ID NO: 92774 - protein, 9 aa, synthetic construct
  source 1..9: note = Seed: VVVGAGDVG (KRAS G13D)
MVVQAVDVV

SEQ ID NO: 92775 - protein, 9 aa, synthetic construct
  source 1..9: note = Seed: VVVGAGDVG (KRAS G13D)
MVVQAVDVY

SEQ ID NO: 92776 - protein, 9 aa, synthetic construct
  source 1..9: note = Seed: VVVGAGDVG (KRAS G13D)
MVVSAADVA

SEQ ID NO: 92777 - protein, 9 aa, synthetic construct
  source 1..9: note = Seed: VVVGAGDVG (KRAS G13D)
MVVSAADVC

SEQ ID NO: 92778 - protein, 9 aa, synthetic construct
  source 1..9: note = Seed: VVVGAGDVG (KRAS G13D)
MVVSAADVD

SEQ ID NO: 92779 - protein, 9 aa, synthetic construct
  source 1..9: note = Seed: VVVGAGDVG (KRAS G13D)
MVVSAADVG

SEQ ID NO: 92780 - protein, 9 aa, synthetic construct
  source 1..9: note = Seed: VVVGAGDVG (KRAS G13D)
MVVSAADVH

SEQ ID NO: 92781 - protein, 9 aa, synthetic construct
  source 1..9: note = Seed: VVVGAGDVG (KRAS G13D)
MVVSAADVI

SEQ ID NO: 92782 - protein, 9 aa, synthetic construct
  source 1..9: note = Seed: VVVGAGDVG (KRAS G13D)
MVVSAADVL

SEQ ID NO: 92783 - protein, 9 aa, synthetic construct
  source 1..9: note = Seed: VVVGAGDVG (KRAS G13D)
MVVSAADVM

SEQ ID NO: 92784 - protein, 9 aa, synthetic construct
  source 1..9: note = Seed: VVVGAGDVG (KRAS G13D)
MVVSAADVN

SEQ ID NO: 92785 - protein, 9 aa, synthetic construct
  source 1..9: note = Seed: VVVGAGDVG (KRAS G13D)
MVVSAADVQ

SEQ ID NO: 92786 - protein, 9 aa, synthetic construct
  source 1..9: note = Seed: VVVGAGDVG (KRAS G13D)
MVVSAADVS

SEQ ID NO: 92787 - protein, 9 aa, synthetic construct
  source 1..9: note = Seed: VVVGAGDVG (KRAS G13D)
MVVSAADVT

SEQ ID NO: 92788 - protein, 9 aa, synthetic construct
  source 1..9: note = Seed: VVVGAGDVG (KRAS G13D)
MVVSAADVV

SEQ ID NO: 92789 - protein, 9 aa, synthetic construct
  source 1..9: note = Seed: VVVGAGDVG (KRAS G13D)
MVVSADDVA

SEQ ID NO: 92790 - protein, 9 aa, synthetic construct
  source 1..9: note = Seed: VVVGAGDVG (KRAS G13D)
MVVSADDVI

SEQ ID NO: 92791 - protein, 9 aa, synthetic construct
  source 1..9: note = Seed: VVVGAGDVG (KRAS G13D)
MVVSADDVL

SEQ ID NO: 92792 - protein, 9 aa, synthetic construct
  source 1..9: note = Seed: VVVGAGDVG (KRAS G13D)
MVVSADDVS

SEQ ID NO: 92793 - protein, 9 aa, synthetic construct
  source 1..9: note = Seed: VVVGAGDVG (KRAS G13D)
MVVSAGDVA

SEQ ID NO: 92794 - protein, 9 aa, synthetic construct
  source 1..9: note = Seed: VVVGAGDVG (KRAS G13D)
MVVSAGDVH

SEQ ID NO: 92795 - protein, 9 aa, synthetic construct
  source 1..9: note = Seed: VVVGAGDVG (KRAS G13D)
MVVSAGDVI

SEQ ID NO: 92796 - protein, 9 aa, synthetic construct
  source 1..9: note = Seed: VVVGAGDVG (KRAS G13D)
MVVSAGDVL

SEQ ID NO: 92797 - protein, 9 aa, synthetic construct
  source 1..9: note = Seed: VVVGAGDVG (KRAS G13D)
MVVSAGDVM

SEQ ID NO: 92798 - protein, 9 aa, synthetic construct
  source 1..9: note = Seed: VVVGAGDVG (KRAS G13D)
MVVSAGDVN

SEQ ID NO: 92799 - protein, 9 aa, synthetic construct
  source 1..9: note = Seed: VVVGAGDVG (KRAS G13D)
MVVSAGDVQ

SEQ ID NO: 92800 - protein, 9 aa, synthetic construct
  source 1..9: note = Seed: VVVGAGDVG (KRAS G13D)
MVVSAGDVS

SEQ ID NO: 92801 - protein, 9 aa, synthetic construct
  source 1..9: note = Seed: VVVGAGDVG (KRAS G13D)
MVVSAGDVT

SEQ ID NO: 92802 - protein, 9 aa, synthetic construct
  source 1..9: note = Seed: VVVGAGDVG (KRAS G13D)
MVVSAGDVV

SEQ ID NO: 92803 - protein, 9 aa, synthetic construct
  source 1..9: note = Seed: VVVGAGDVG (KRAS G13D)
MVVSAIDVA

SEQ ID NO: 92804 - protein, 9 aa, synthetic construct
  source 1..9: note = Seed: VVVGAGDVG (KRAS G13D)
MVVSAIDVC

SEQ ID NO: 92805 - protein, 9 aa, synthetic construct
  source 1..9: note = Seed: VVVGAGDVG (KRAS G13D)
MVVSAIDVE

SEQ ID NO: 92806 - protein, 9 aa, synthetic construct
  source 1..9: note = Seed: VVVGAGDVG (KRAS G13D)
MVVSAIDVG

SEQ ID NO: 92807 - protein, 9 aa, synthetic construct
  source 1..9: note = Seed: VVVGAGDVG (KRAS G13D)
MVVSAIDVI

SEQ ID NO: 92808 - protein, 9 aa, synthetic construct
  source 1..9: note = Seed: VVVGAGDVG (KRAS G13D)
MVVSAIDVL

SEQ ID NO: 92809 - protein, 9 aa, synthetic construct
  source 1..9: note = Seed: VVVGAGDVG (KRAS G13D)
MVVSAIDVM

SEQ ID NO: 92810 - protein, 9 aa, synthetic construct
  source 1..9: note = Seed: VVVGAGDVG (KRAS G13D)
MVVSAIDVN

SEQ ID NO: 92811 - protein, 9 aa, synthetic construct
  source 1..9: note = Seed: VVVGAGDVG (KRAS G13D)
MVVSAIDVQ

SEQ ID NO: 92812 - protein, 9 aa, synthetic construct
  source 1..9: note = Seed: VVVGAGDVG (KRAS G13D)
MVVSAIDVS

SEQ ID NO: 92813 - protein, 9 aa, synthetic construct
  source 1..9: note = Seed: VVVGAGDVG (KRAS G13D)
MVVSAIDVT

SEQ ID NO: 92814 - protein, 9 aa, synthetic construct
  source 1..9: note = Seed: VVVGAGDVG (KRAS G13D)
MVVSAIDVV

SEQ ID NO: 92815 - protein, 9 aa, synthetic construct
  source 1..9: note = Seed: VVVGAGDVG (KRAS G13D)
MVVSALDVA

SEQ ID NO: 92816 - protein, 9 aa, synthetic construct
  source 1..9: note = Seed: VVVGAGDVG (KRAS G13D)
MVVSALDVE

SEQ ID NO: 92817 - protein, 9 aa, synthetic construct
  source 1..9: note = Seed: VVVGAGDVG (KRAS G13D)
MVVSALDVI

SEQ ID NO: 92818 - protein, 9 aa, synthetic construct
  source 1..9: note = Seed: VVVGAGDVG (KRAS G13D)
MVVSALDVL

SEQ ID NO: 92819 - protein, 9 aa, synthetic construct
  source 1..9: note = Seed: VVVGAGDVG (KRAS G13D)
MVVSALDVM

SEQ ID NO: 92820 - protein, 9 aa, synthetic construct
  source 1..9: note = Seed: VVVGAGDVG (KRAS G13D)
MVVSALDVN

SEQ ID NO: 92821 - protein, 9 aa, synthetic construct
  source 1..9: note = Seed: VVVGAGDVG (KRAS G13D)
MVVSALDVQ

SEQ ID NO: 92822 - protein, 9 aa, synthetic construct
  source 1..9: note = Seed: VVVGAGDVG (KRAS G13D)
MVVSALDVS

SEQ ID NO: 92823 - protein, 9 aa, synthetic construct
  source 1..9: note = Seed: VVVGAGDVG (KRAS G13D)
MVVSALDVV

SEQ ID NO: 92824 - protein, 9 aa, synthetic construct
  source 1..9: note = Seed: VVVGAGDVG (KRAS G13D)
MVVSAMDVI

SEQ ID NO: 92825 - protein, 9 aa, synthetic construct
  source 1..9: note = Seed: VVVGAGDVG (KRAS G13D)
MVVSAMDVL

SEQ ID NO: 92826 - protein, 9 aa, synthetic construct
  source 1..9: note = Seed: VVVGAGDVG (KRAS G13D)
MVVSAMDVM

SEQ ID NO: 92827 - protein, 9 aa, synthetic construct
  source 1..9: note = Seed: VVVGAGDVG (KRAS G13D)
MVVSAMDVS

SEQ ID NO: 92828 - protein, 9 aa, synthetic construct
  source 1..9: note = Seed: VVVGAGDVG (KRAS G13D)
MVVSAMDVV

SEQ ID NO: 92829 - protein, 9 aa, synthetic construct
  source 1..9: note = Seed: VVVGAGDVG (KRAS G13D)
MVVSANDVA

SEQ ID NO: 92830 - protein, 9 aa, synthetic construct
  source 1..9: note = Seed: VVVGAGDVG (KRAS G13D)
MVVSANDVC

SEQ ID NO: 92831 - protein, 9 aa, synthetic construct
  source 1..9: note = Seed: VVVGAGDVG (KRAS G13D)
MVVSANDVG

SEQ ID NO: 92832 - protein, 9 aa, synthetic construct
  source 1..9: note = Seed: VVVGAGDVG (KRAS G13D)
MVVSANDVH

SEQ ID NO: 92833 - protein, 9 aa, synthetic construct
  source 1..9: note = Seed: VVVGAGDVG (KRAS G13D)
MVVSANDVI

SEQ ID NO: 92834 - protein, 9 aa, synthetic construct
  source 1..9: note = Seed: VVVGAGDVG (KRAS G13D)
MVVSANDVL

SEQ ID NO: 92835 - protein, 9 aa, synthetic construct
  source 1..9: note = Seed: VVVGAGDVG (KRAS G13D)
MVVSANDVM

SEQ ID NO: 92836 - protein, 9 aa, synthetic construct
  source 1..9: note = Seed: VVVGAGDVG (KRAS G13D)
MVVSANDVN

SEQ ID NO: 92837 - protein, 9 aa, synthetic construct
  source 1..9: note = Seed: VVVGAGDVG (KRAS G13D)
MVVSANDVQ

SEQ ID NO: 92838 - protein, 9 aa, synthetic construct
  source 1..9: note = Seed: VVVGAGDVG (KRAS G13D)
MVVSANDVS

SEQ ID NO: 92839 - protein, 9 aa, synthetic construct
  source 1..9: note = Seed: VVVGAGDVG (KRAS G13D)
MVVSANDVT

SEQ ID NO: 92840 - protein, 9 aa, synthetic construct
  source 1..9: note = Seed: VVVGAGDVG (KRAS G13D)
MVVSANDVV

SEQ ID NO: 92841 - protein, 9 aa, synthetic construct
  source 1..9: note = Seed: VVVGAGDVG (KRAS G13D)
MVVSAPDVA

SEQ ID NO: 92842 - protein, 9 aa, synthetic construct
  source 1..9: note = Seed: VVVGAGDVG (KRAS G13D)
MVVSAPDVG

SEQ ID NO: 92843 - protein, 9 aa, synthetic construct
  source 1..9: note = Seed: VVVGAGDVG (KRAS G13D)
MVVSAPDVH

SEQ ID NO: 92844 - protein, 9 aa, synthetic construct
  source 1..9: note = Seed: VVVGAGDVG (KRAS G13D)
MVVSAPDVI

SEQ ID NO: 92845 - protein, 9 aa, synthetic construct
  source 1..9: note = Seed: VVVGAGDVG (KRAS G13D)
MVVSAPDVL

SEQ ID NO: 92846 - protein, 9 aa, synthetic construct
  source 1..9: note = Seed: VVVGAGDVG (KRAS G13D)
MVVSAPDVM

SEQ ID NO: 92847 - protein, 9 aa, synthetic construct
  source 1..9: note = Seed: VVVGAGDVG (KRAS G13D)
MVVSAPDVN

SEQ ID NO: 92848 - protein, 9 aa, synthetic construct
  source 1..9: note = Seed: VVVGAGDVG (KRAS G13D)
MVVSAPDVQ

SEQ ID NO: 92849 - protein, 9 aa, synthetic construct
  source 1..9: note = Seed: VVVGAGDVG (KRAS G13D)
MVVSAPDVS

SEQ ID NO: 92850 - protein, 9 aa, synthetic construct
  source 1..9: note = Seed: VVVGAGDVG (KRAS G13D)
MVVSAPDVT

SEQ ID NO: 92851 - protein, 9 aa, synthetic construct
  source 1..9: note = Seed: VVVGAGDVG (KRAS G13D)
MVVSAPDVV

SEQ ID NO: 92852 - protein, 9 aa, synthetic construct
  source 1..9: note = Seed: VVVGAGDVG (KRAS G13D)
MVVSASDVA

SEQ ID NO: 92853 - protein, 9 aa, synthetic construct
  source 1..9: note = Seed: VVVGAGDVG (KRAS G13D)
MVVSASDVC

SEQ ID NO: 92854 - protein, 9 aa, synthetic construct
  source 1..9: note = Seed: VVVGAGDVG (KRAS G13D)
MVVSASDVG

SEQ ID NO: 92855 - protein, 9 aa, synthetic construct
  source 1..9: note = Seed: VVVGAGDVG (KRAS G13D)
MVVSASDVH

SEQ ID NO: 92856 - protein, 9 aa, synthetic construct
  source 1..9: note = Seed: VVVGAGDVG (KRAS G13D)
MVVSASDVI

SEQ ID NO: 92857 - protein, 9 aa, synthetic construct
  source 1..9: note = Seed: VVVGAGDVG (KRAS G13D)
MVVSASDVL

SEQ ID NO: 92858 - protein, 9 aa, synthetic construct
  source 1..9: note = Seed: VVVGAGDVG (KRAS G13D)
MVVSASDVM

SEQ ID NO: 92859 - protein, 9 aa, synthetic construct
  source 1..9: note = Seed: VVVGAGDVG (KRAS G13D)
MVVSASDVN

SEQ ID NO: 92860 - protein, 9 aa, synthetic construct
  source 1..9: note = Seed: VVVGAGDVG (KRAS G13D)
MVVSASDVQ

SEQ ID NO: 92861 - protein, 9 aa, synthetic construct
  source 1..9: note = Seed: VVVGAGDVG (KRAS G13D)
MVVSASDVS

SEQ ID NO: 92862 - protein, 9 aa, synthetic construct
  source 1..9: note = Seed: VVVGAGDVG (KRAS G13D)
MVVSASDVT

SEQ ID NO: 92863 - protein, 9 aa, synthetic construct
  source 1..9: note = Seed: VVVGAGDVG (KRAS G13D)
MVVSASDVV

SEQ ID NO: 92864 - protein, 9 aa, synthetic construct
  source 1..9: note = Seed: VVVGAGDVG (KRAS G13D)
MVVSATDVA

SEQ ID NO: 92865 - protein, 9 aa, synthetic construct
  source 1..9: note = Seed: VVVGAGDVG (KRAS G13D)
MVVSATDVC

SEQ ID NO: 92866 - protein, 9 aa, synthetic construct
  source 1..9: note = Seed: VVVGAGDVG (KRAS G13D)
MVVSATDVD

SEQ ID NO: 92867 - protein, 9 aa, synthetic construct
  source 1..9: note = Seed: VVVGAGDVG (KRAS G13D)
MVVSATDVG

SEQ ID NO: 92868 - protein, 9 aa, synthetic construct
  source 1..9: note = Seed: VVVGAGDVG (KRAS G13D)
MVVSATDVH

SEQ ID NO: 92869 - protein, 9 aa, synthetic construct
  source 1..9: note = Seed: VVVGAGDVG (KRAS G13D)
MVVSATDVI

SEQ ID NO: 92870 - protein, 9 aa, synthetic construct
  source 1..9: note = Seed: VVVGAGDVG (KRAS G13D)
MVVSATDVL

SEQ ID NO: 92871 - protein, 9 aa, synthetic construct
  source 1..9: note = Seed: VVVGAGDVG (KRAS G13D)
MVVSATDVM

SEQ ID NO: 92872 - protein, 9 aa, synthetic construct
  source 1..9: note = Seed: VVVGAGDVG (KRAS G13D)
MVVSATDVN

SEQ ID NO: 92873 - protein, 9 aa, synthetic construct
  source 1..9: note = Seed: VVVGAGDVG (KRAS G13D)
MVVSATDVQ

SEQ ID NO: 92874 - protein, 9 aa, synthetic construct
  source 1..9: note = Seed: VVVGAGDVG (KRAS G13D)
MVVSATDVS

SEQ ID NO: 92875 - protein, 9 aa, synthetic construct
  source 1..9: note = Seed: VVVGAGDVG (KRAS G13D)
MVVSATDVT

SEQ ID NO: 92876 - protein, 9 aa, synthetic construct
  source 1..9: note = Seed: VVVGAGDVG (KRAS G13D)
MVVSATDVV

SEQ ID NO: 92877 - protein, 9 aa, synthetic construct
  source 1..9: note = Seed: VVVGAGDVG (KRAS G13D)
MVVSAVDVA

SEQ ID NO: 92878 - protein, 9 aa, synthetic construct
  source 1..9: note = Seed: VVVGAGDVG (KRAS G13D)
MVVSAVDVC

SEQ ID NO: 92879 - protein, 9 aa, synthetic construct
  source 1..9: note = Seed: VVVGAGDVG (KRAS G13D)
MVVSAVDVG

SEQ ID NO: 92880 - protein, 9 aa, synthetic construct
  source 1..9: note = Seed: VVVGAGDVG (KRAS G13D)
MVVSAVDVI

SEQ ID NO: 92881 - protein, 9 aa, synthetic construct
  source 1..9: note = Seed: VVVGAGDVG (KRAS G13D)
MVVSAVDVL

SEQ ID NO: 92882 - protein, 9 aa, synthetic construct
  source 1..9: note = Seed: VVVGAGDVG (KRAS G13D)
MVVSAVDVM

SEQ ID NO: 92883 - protein, 9 aa, synthetic construct
  source 1..9: note = Seed: VVVGAGDVG (KRAS G13D)
MVVSAVDVN

SEQ ID NO: 92884 - protein, 9 aa, synthetic construct
  source 1..9: note = Seed: VVVGAGDVG (KRAS G13D)
MVVSAVDVQ

SEQ ID NO: 92885 - protein, 9 aa, synthetic construct
  source 1..9: note = Seed: VVVGAGDVG (KRAS G13D)
MVVSAVDVS

SEQ ID NO: 92886 - protein, 9 aa, synthetic construct
  source 1..9: note = Seed: VVVGAGDVG (KRAS G13D)
MVVSAVDVT

SEQ ID NO: 92887 - protein, 9 aa, synthetic construct
  source 1..9: note = Seed: VVVGAGDVG (KRAS G13D)
MVVSAVDVV

SEQ ID NO: 92888 - protein, 9 aa, synthetic construct
  source 1..9: note = Seed: VVVGAGDVG (KRAS G13D)
MVVTAADVA

SEQ ID NO: 92889 - protein, 9 aa, synthetic construct
  source 1..9: note = Seed: VVVGAGDVG (KRAS G13D)
MVVTAADVC

SEQ ID NO: 92890 - protein, 9 aa, synthetic construct
  source 1..9: note = Seed: VVVGAGDVG (KRAS G13D)
MVVTAADVD

SEQ ID NO: 92891 - protein, 9 aa, synthetic construct
  source 1..9: note = Seed: VVVGAGDVG (KRAS G13D)
MVVTAADVG

SEQ ID NO: 92892 - protein, 9 aa, synthetic construct
  source 1..9: note = Seed: VVVGAGDVG (KRAS G13D)
MVVTAADVH

SEQ ID NO: 92893 - protein, 9 aa, synthetic construct
  source 1..9: note = Seed: VVVGAGDVG (KRAS G13D)
MVVTAADVI

SEQ ID NO: 92894 - protein, 9 aa, synthetic construct
  source 1..9: note = Seed: VVVGAGDVG (KRAS G13D)
MVVTAADVL

SEQ ID NO: 92895 - protein, 9 aa, synthetic construct
  source 1..9: note = Seed: VVVGAGDVG (KRAS G13D)
MVVTAADVM

SEQ ID NO: 92896 - protein, 9 aa, synthetic construct
  source 1..9: note = Seed: VVVGAGDVG (KRAS G13D)
MVVTAADVN

SEQ ID NO: 92897 - protein, 9 aa, synthetic construct
  source 1..9: note = Seed: VVVGAGDVG (KRAS G13D)
MVVTAADVQ

SEQ ID NO: 92898 - protein, 9 aa, synthetic construct
  source 1..9: note = Seed: VVVGAGDVG (KRAS G13D)
MVVTAADVS

SEQ ID NO: 92899 - protein, 9 aa, synthetic construct
  source 1..9: note = Seed: VVVGAGDVG (KRAS G13D)
MVVTAADVT

SEQ ID NO: 92900 - protein, 9 aa, synthetic construct
  source 1..9: note = Seed: VVVGAGDVG (KRAS G13D)
MVVTAADVV

SEQ ID NO: 92901 - protein, 9 aa, synthetic construct
  source 1..9: note = Seed: VVVGAGDVG (KRAS G13D)
MVVTAGDVA

SEQ ID NO: 92902 - protein, 9 aa, synthetic construct
  source 1..9: note = Seed: VVVGAGDVG (KRAS G13D)
MVVTAGDVH

SEQ ID NO: 92903 - protein, 9 aa, synthetic construct
  source 1..9: note = Seed: VVVGAGDVG (KRAS G13D)
MVVTAGDVI

SEQ ID NO: 92904 - protein, 9 aa, synthetic construct
  source 1..9: note = Seed: VVVGAGDVG (KRAS G13D)
MVVTAGDVL

SEQ ID NO: 92905 - protein, 9 aa, synthetic construct
  source 1..9: note = Seed: VVVGAGDVG (KRAS G13D)
MVVTAGDVM

SEQ ID NO: 92906 - protein, 9 aa, synthetic construct
  source 1..9: note = Seed: VVVGAGDVG (KRAS G13D)
MVVTAGDVN

SEQ ID NO: 92907 - protein, 9 aa, synthetic construct
  source 1..9: note = Seed: VVVGAGDVG (KRAS G13D)
MVVTAGDVQ

SEQ ID NO: 92908 - protein, 9 aa, synthetic construct
  source 1..9: note = Seed: VVVGAGDVG (KRAS G13D)
MVVTAGDVS

SEQ ID NO: 92909 - protein, 9 aa, synthetic construct
  source 1..9: note = Seed: VVVGAGDVG (KRAS G13D)
MVVTAGDVT

SEQ ID NO: 92910 - protein, 9 aa, synthetic construct
  source 1..9: note = Seed: VVVGAGDVG (KRAS G13D)
MVVTAGDVV

SEQ ID NO: 92911 - protein, 9 aa, synthetic construct
  source 1..9: note = Seed: VVVGAGDVG (KRAS G13D)
MVVTAIDVG

SEQ ID NO: 92912 - protein, 9 aa, synthetic construct
  source 1..9: note = Seed: VVVGAGDVG (KRAS G13D)
MVVTAIDVS

SEQ ID NO: 92913 - protein, 9 aa, synthetic construct
  source 1..9: note = Seed: VVVGAGDVG (KRAS G13D)
MVVTALDVA

SEQ ID NO: 92914 - protein, 9 aa, synthetic construct
  source 1..9: note = Seed: VVVGAGDVG (KRAS G13D)
MVVTALDVM

SEQ ID NO: 92915 - protein, 9 aa, synthetic construct
  source 1..9: note = Seed: VVVGAGDVG (KRAS G13D)
MVVTANDVA

SEQ ID NO: 92916 - protein, 9 aa, synthetic construct
  source 1..9: note = Seed: VVVGAGDVG (KRAS G13D)
MVVTANDVC

SEQ ID NO: 92917 - protein, 9 aa, synthetic construct
  source 1..9: note = Seed: VVVGAGDVG (KRAS G13D)
MVVTANDVG

SEQ ID NO: 92918 - protein, 9 aa, synthetic construct
  source 1..9: note = Seed: VVVGAGDVG (KRAS G13D)
MVVTANDVI

SEQ ID NO: 92919 - protein, 9 aa, synthetic construct
  source 1..9: note = Seed: VVVGAGDVG (KRAS G13D)
MVVTANDVN

SEQ ID NO: 92920 - protein, 9 aa, synthetic construct
  source 1..9: note = Seed: VVVGAGDVG (KRAS G13D)
MVVTANDVS

SEQ ID NO: 92921 - protein, 9 aa, synthetic construct
  source 1..9: note = Seed: VVVGAGDVG (KRAS G13D)
MVVTANDVV

SEQ ID NO: 92922 - protein, 9 aa, synthetic construct
  source 1..9: note = Seed: VVVGAGDVG (KRAS G13D)
MVVTAPDVA

SEQ ID NO: 92923 - protein, 9 aa, synthetic construct
  source 1..9: note = Seed: VVVGAGDVG (KRAS G13D)
MVVTAPDVG

SEQ ID NO: 92924 - protein, 9 aa, synthetic construct
  source 1..9: note = Seed: VVVGAGDVG (KRAS G13D)
MVVTAPDVH

SEQ ID NO: 92925 - protein, 9 aa, synthetic construct
  source 1..9: note = Seed: VVVGAGDVG (KRAS G13D)
MVVTAPDVI

SEQ ID NO: 92926 - protein, 9 aa, synthetic construct
  source 1..9: note = Seed: VVVGAGDVG (KRAS G13D)
MVVTAPDVL

SEQ ID NO: 92927 - protein, 9 aa, synthetic construct
  source 1..9: note = Seed: VVVGAGDVG (KRAS G13D)
MVVTAPDVM

SEQ ID NO: 92928 - protein, 9 aa, synthetic construct
  source 1..9: note = Seed: VVVGAGDVG (KRAS G13D)
MVVTAPDVN

SEQ ID NO: 92929 - protein, 9 aa, synthetic construct
  source 1..9: note = Seed: VVVGAGDVG (KRAS G13D)
MVVTAPDVQ

SEQ ID NO: 92930 - protein, 9 aa, synthetic construct
  source 1..9: note = Seed: VVVGAGDVG (KRAS G13D)
MVVTAPDVS

SEQ ID NO: 92931 - protein, 9 aa, synthetic construct
  source 1..9: note = Seed: VVVGAGDVG (KRAS G13D)
MVVTAPDVT

SEQ ID NO: 92932 - protein, 9 aa, synthetic construct
  source 1..9: note = Seed: VVVGAGDVG (KRAS G13D)
MVVTAPDVV

SEQ ID NO: 92933 - protein, 9 aa, synthetic construct
  source 1..9: note = Seed: VVVGAGDVG (KRAS G13D)
MVVTASDVA

SEQ ID NO: 92934 - protein, 9 aa, synthetic construct
  source 1..9: note = Seed: VVVGAGDVG (KRAS G13D)
MVVTASDVC

SEQ ID NO: 92935 - protein, 9 aa, synthetic construct
  source 1..9: note = Seed: VVVGAGDVG (KRAS G13D)
MVVTASDVG

SEQ ID NO: 92936 - protein, 9 aa, synthetic construct
  source 1..9: note = Seed: VVVGAGDVG (KRAS G13D)
MVVTASDVI

SEQ ID NO: 92937 - protein, 9 aa, synthetic construct
  source 1..9: note = Seed: VVVGAGDVG (KRAS G13D)
MVVTASDVL

SEQ ID NO: 92938 - protein, 9 aa, synthetic construct
  source 1..9: note = Seed: VVVGAGDVG (KRAS G13D)
MVVTASDVM

SEQ ID NO: 92939 - protein, 9 aa, synthetic construct
  source 1..9: note = Seed: VVVGAGDVG (KRAS G13D)
MVVTASDVN

SEQ ID NO: 92940 - protein, 9 aa, synthetic construct
  source 1..9: note = Seed: VVVGAGDVG (KRAS G13D)
MVVTASDVQ

SEQ ID NO: 92941 - protein, 9 aa, synthetic construct
  source 1..9: note = Seed: VVVGAGDVG (KRAS G13D)
MVVTASDVS

SEQ ID NO: 92942 - protein, 9 aa, synthetic construct
  source 1..9: note = Seed: VVVGAGDVG (KRAS G13D)
MVVTASDVT

SEQ ID NO: 92943 - protein, 9 aa, synthetic construct
  source 1..9: note = Seed: VVVGAGDVG (KRAS G13D)
MVVTASDVV

SEQ ID NO: 92944 - protein, 9 aa, synthetic construct
  source 1..9: note = Seed: VVVGAGDVG (KRAS G13D)
MVVTATDVA

SEQ ID NO: 92945 - protein, 9 aa, synthetic construct
  source 1..9: note = Seed: VVVGAGDVG (KRAS G13D)
MVVTATDVD

SEQ ID NO: 92946 - protein, 9 aa, synthetic construct
  source 1..9: note = Seed: VVVGAGDVG (KRAS G13D)
MVVTATDVG

SEQ ID NO: 92947 - protein, 9 aa, synthetic construct
  source 1..9: note = Seed: VVVGAGDVG (KRAS G13D)
MVVTATDVH

SEQ ID NO: 92948 - protein, 9 aa, synthetic construct
  source 1..9: note = Seed: VVVGAGDVG (KRAS G13D)
MVVTATDVI

SEQ ID NO: 92949 - protein, 9 aa, synthetic construct
  source 1..9: note = Seed: VVVGAGDVG (KRAS G13D)
MVVTATDVL

SEQ ID NO: 92950 - protein, 9 aa, synthetic construct
  source 1..9: note = Seed: VVVGAGDVG (KRAS G13D)
MVVTATDVM

SEQ ID NO: 92951 - protein, 9 aa, synthetic construct
  source 1..9: note = Seed: VVVGAGDVG (KRAS G13D)
MVVTATDVN

SEQ ID NO: 92952 - protein, 9 aa, synthetic construct
  source 1..9: note = Seed: VVVGAGDVG (KRAS G13D)
MVVTATDVQ

SEQ ID NO: 92953 - protein, 9 aa, synthetic construct
  source 1..9: note = Seed: VVVGAGDVG (KRAS G13D)
MVVTATDVS

SEQ ID NO: 92954 - protein, 9 aa, synthetic construct
  source 1..9: note = Seed: VVVGAGDVG (KRAS G13D)
MVVTATDVT

SEQ ID NO: 92955 - protein, 9 aa, synthetic construct
  source 1..9: note = Seed: VVVGAGDVG (KRAS G13D)
MVVTATDVV

SEQ ID NO: 92956 - protein, 9 aa, synthetic construct
  source 1..9: note = Seed: VVVGAGDVG (KRAS G13D)
MVVTAVDVA

SEQ ID NO: 92957 - protein, 9 aa, synthetic construct
  source 1..9: note = Seed: VVVGAGDVG (KRAS G13D)
MVVTAVDVG

SEQ ID NO: 92958 - protein, 9 aa, synthetic construct
  source 1..9: note = Seed: VVVGAGDVG (KRAS G13D)
MVVTAVDVM

SEQ ID NO: 92959 - protein, 9 aa, synthetic construct
  source 1..9: note = Seed: VVVGAGDVG (KRAS G13D)
MVVTAVDVN

SEQ ID NO: 92960 - protein, 9 aa, synthetic construct
  source 1..9: note = Seed: VVVGAGDVG (KRAS G13D)
MVVTAVDVS

SEQ ID NO: 92961 - protein, 9 aa, synthetic construct
  source 1..9: note = Seed: VVVGAGDVG (KRAS G13D)
MVVTAVDVT

SEQ ID NO: 92962 - protein, 9 aa, synthetic construct
  source 1..9: note = Seed: VVVGAGDVG (KRAS G13D)
MVVVAADVA

SEQ ID NO: 92963 - protein, 9 aa, synthetic construct
  source 1..9: note = Seed: VVVGAGDVG (KRAS G13D)
MVVVAADVD

SEQ ID NO: 92964 - protein, 9 aa, synthetic construct
  source 1..9: note = Seed: VVVGAGDVG (KRAS G13D)
MVVVAADVG

SEQ ID NO: 92965 - protein, 9 aa, synthetic construct
  source 1..9: note = Seed: VVVGAGDVG (KRAS G13D)
MVVVAADVL

SEQ ID NO: 92966 - protein, 9 aa, synthetic construct
  source 1..9: note = Seed: VVVGAGDVG (KRAS G13D)
MVVVAADVM

SEQ ID NO: 92967 - protein, 9 aa, synthetic construct
  source 1..9: note = Seed: VVVGAGDVG (KRAS G13D)
MVVVAADVN

SEQ ID NO: 92968 - protein, 9 aa, synthetic construct
  source 1..9: note = Seed: VVVGAGDVG (KRAS G13D)
MVVVAADVQ

SEQ ID NO: 92969 - protein, 9 aa, synthetic construct
  source 1..9: note = Seed: VVVGAGDVG (KRAS G13D)
MVVVAADVS

SEQ ID NO: 92970 - protein, 9 aa, synthetic construct
  source 1..9: note = Seed: VVVGAGDVG (KRAS G13D)
MVVVAADVT

SEQ ID NO: 92971 - protein, 9 aa, synthetic construct
  source 1..9: note = Seed: VVVGAGDVG (KRAS G13D)
MVVVADDVA

SEQ ID NO: 92972 - protein, 9 aa, synthetic construct
  source 1..9: note = Seed: VVVGAGDVG (KRAS G13D)
MVVVADDVI

SEQ ID NO: 92973 - protein, 9 aa, synthetic construct
  source 1..9: note = Seed: VVVGAGDVG (KRAS G13D)
MVVVADDVL

SEQ ID NO: 92974 - protein, 9 aa, synthetic construct
  source 1..9: note = Seed: VVVGAGDVG (KRAS G13D)
MVVVADDVV

SEQ ID NO: 92975 - protein, 9 aa, synthetic construct
  source 1..9: note = Seed: VVVGAGDVG (KRAS G13D)
MVVVAGDVA

SEQ ID NO: 92976 - protein, 9 aa, synthetic construct
  source 1..9: note = Seed: VVVGAGDVG (KRAS G13D)
MVVVAGDVN

SEQ ID NO: 92977 - protein, 9 aa, synthetic construct
  source 1..9: note = Seed: VVVGAGDVG (KRAS G13D)
MVVVAGDVS

SEQ ID NO: 92978 - protein, 9 aa, synthetic construct
  source 1..9: note = Seed: VVVGAGDVG (KRAS G13D)
MVVVAIDVA

SEQ ID NO: 92979 - protein, 9 aa, synthetic construct
  source 1..9: note = Seed: VVVGAGDVG (KRAS G13D)
MVVVANDVA

SEQ ID NO: 92980 - protein, 9 aa, synthetic construct
  source 1..9: note = Seed: VVVGAGDVG (KRAS G13D)
MVVVANDVC

SEQ ID NO: 92981 - protein, 9 aa, synthetic construct
  source 1..9: note = Seed: VVVGAGDVG (KRAS G13D)
MVVVANDVG

SEQ ID NO: 92982 - protein, 9 aa, synthetic construct
  source 1..9: note = Seed: VVVGAGDVG (KRAS G13D)
MVVVANDVH

SEQ ID NO: 92983 - protein, 9 aa, synthetic construct
  source 1..9: note = Seed: VVVGAGDVG (KRAS G13D)
MVVVANDVI

SEQ ID NO: 92984 - protein, 9 aa, synthetic construct
  source 1..9: note = Seed: VVVGAGDVG (KRAS G13D)
MVVVANDVL

SEQ ID NO: 92985 - protein, 9 aa, synthetic construct
  source 1..9: note = Seed: VVVGAGDVG (KRAS G13D)
MVVVANDVM

SEQ ID NO: 92986 - protein, 9 aa, synthetic construct
  source 1..9: note = Seed: VVVGAGDVG (KRAS G13D)
MVVVANDVN

SEQ ID NO: 92987 - protein, 9 aa, synthetic construct
  source 1..9: note = Seed: VVVGAGDVG (KRAS G13D)
MVVVANDVQ

SEQ ID NO: 92988 - protein, 9 aa, synthetic construct
  source 1..9: note = Seed: VVVGAGDVG (KRAS G13D)
MVVVANDVS

SEQ ID NO: 92989 - protein, 9 aa, synthetic construct
  source 1..9: note = Seed: VVVGAGDVG (KRAS G13D)
MVVVANDVT

SEQ ID NO: 92990 - protein, 9 aa, synthetic construct
  source 1..9: note = Seed: VVVGAGDVG (KRAS G13D)
MVVVANDVV

SEQ ID NO: 92991 - protein, 9 aa, synthetic construct
  source 1..9: note = Seed: VVVGAGDVG (KRAS G13D)
MVVVAPDVA

SEQ ID NO: 92992 - protein, 9 aa, synthetic construct
  source 1..9: note = Seed: VVVGAGDVG (KRAS G13D)
MVVVAPDVG

SEQ ID NO: 92993 - protein, 9 aa, synthetic construct
  source 1..9: note = Seed: VVVGAGDVG (KRAS G13D)
MVVVAPDVH

SEQ ID NO: 92994 - protein, 9 aa, synthetic construct
  source 1..9: note = Seed: VVVGAGDVG (KRAS G13D)
MVVVAPDVI

SEQ ID NO: 92995 - protein, 9 aa, synthetic construct
  source 1..9: note = Seed: VVVGAGDVG (KRAS G13D)
MVVVAPDVL

SEQ ID NO: 92996 - protein, 9 aa, synthetic construct
  source 1..9: note = Seed: VVVGAGDVG (KRAS G13D)
MVVVAPDVM

SEQ ID NO: 92997 - protein, 9 aa, synthetic construct
  source 1..9: note = Seed: VVVGAGDVG (KRAS G13D)
MVVVAPDVN

SEQ ID NO: 92998 - protein, 9 aa, synthetic construct
  source 1..9: note = Seed: VVVGAGDVG (KRAS G13D)
MVVVAPDVQ

SEQ ID NO: 92999 - protein, 9 aa, synthetic construct
  source 1..9: note = Seed: VVVGAGDVG (KRAS G13D)
MVVVAPDVS

SEQ ID NO: 93000 - protein, 9 aa, synthetic construct
  source 1..9: note = Seed: VVVGAGDVG (KRAS G13D)
MVVVAPDVT

SEQ ID NO: 93001 - protein, 9 aa, synthetic construct
  source 1..9: note = Seed: VVVGAGDVG (KRAS G13D)
MVVVAPDVV

SEQ ID NO: 93002 - protein, 9 aa, synthetic construct
  source 1..9: note = Seed: VVVGAGDVG (KRAS G13D)
MVVVAPDVY

SEQ ID NO: 93003 - protein, 9 aa, synthetic construct
  source 1..9: note = Seed: VVVGAGDVG (KRAS G13D)
MVVVASDVA

SEQ ID NO: 93004 - protein, 9 aa, synthetic construct
  source 1..9: note = Seed: VVVGAGDVG (KRAS G13D)
MVVVASDVD

SEQ ID NO: 93005 - protein, 9 aa, synthetic construct
  source 1..9: note = Seed: VVVGAGDVG (KRAS G13D)
MVVVASDVG

SEQ ID NO: 93006 - protein, 9 aa, synthetic construct
  source 1..9: note = Seed: VVVGAGDVG (KRAS G13D)
MVVVASDVH

SEQ ID NO: 93007 - protein, 9 aa, synthetic construct
  source 1..9: note = Seed: VVVGAGDVG (KRAS G13D)
MVVVASDVI

SEQ ID NO: 93008 - protein, 9 aa, synthetic construct
  source 1..9: note = Seed: VVVGAGDVG (KRAS G13D)
MVVVASDVL

SEQ ID NO: 93009 - protein, 9 aa, synthetic construct
  source 1..9: note = Seed: VVVGAGDVG (KRAS G13D)
MVVVASDVM

SEQ ID NO: 93010 - protein, 9 aa, synthetic construct
  source 1..9: note = Seed: VVVGAGDVG (KRAS G13D)
MVVVASDVN

SEQ ID NO: 93011 - protein, 9 aa, synthetic construct
  source 1..9: note = Seed: VVVGAGDVG (KRAS G13D)
MVVVASDVQ

SEQ ID NO: 93012 - protein, 9 aa, synthetic construct
  source 1..9: note = Seed: VVVGAGDVG (KRAS G13D)
MVVVASDVS

SEQ ID NO: 93013 - protein, 9 aa, synthetic construct
  source 1..9: note = Seed: VVVGAGDVG (KRAS G13D)
MVVVASDVT

SEQ ID NO: 93014 - protein, 9 aa, synthetic construct
  source 1..9: note = Seed: VVVGAGDVG (KRAS G13D)
MVVVASDVV

SEQ ID NO: 93015 - protein, 9 aa, synthetic construct
  source 1..9: note = Seed: VVVGAGDVG (KRAS G13D)
MVVVATDVA

SEQ ID NO: 93016 - protein, 9 aa, synthetic construct
  source 1..9: note = Seed: VVVGAGDVG (KRAS G13D)
MVVVATDVG

SEQ ID NO: 93017 - protein, 9 aa, synthetic construct
  source 1..9: note = Seed: VVVGAGDVG (KRAS G13D)
MVVVATDVH

SEQ ID NO: 93018 - protein, 9 aa, synthetic construct
  source 1..9: note = Seed: VVVGAGDVG (KRAS G13D)
MVVVATDVI

SEQ ID NO: 93019 - protein, 9 aa, synthetic construct
  source 1..9: note = Seed: VVVGAGDVG (KRAS G13D)
MVVVATDVL

SEQ ID NO: 93020 - protein, 9 aa, synthetic construct
  source 1..9: note = Seed: VVVGAGDVG (KRAS G13D)
MVVVATDVM

SEQ ID NO: 93021 - protein, 9 aa, synthetic construct
  source 1..9: note = Seed: VVVGAGDVG (KRAS G13D)
MVVVATDVN

SEQ ID NO: 93022 - protein, 9 aa, synthetic construct
  source 1..9: note = Seed: VVVGAGDVG (KRAS G13D)
MVVVATDVQ

SEQ ID NO: 93023 - protein, 9 aa, synthetic construct
  source 1..9: note = Seed: VVVGAGDVG (KRAS G13D)
MVVVATDVR

SEQ ID NO: 93024 - protein, 9 aa, synthetic construct
  source 1..9: note = Seed: VVVGAGDVG (KRAS G13D)
MVVVATDVS

SEQ ID NO: 93025 - protein, 9 aa, synthetic construct
  source 1..9: note = Seed: VVVGAGDVG (KRAS G13D)
MVVVATDVT

SEQ ID NO: 93026 - protein, 9 aa, synthetic construct
  source 1..9: note = Seed: VVVGAGDVG (KRAS G13D)
MVVVATDVV

SEQ ID NO: 93027 - protein, 9 aa, synthetic construct
  source 1..9: note = Seed: VVVGAGDVG (KRAS G13D)
MVVVAVDVA

SEQ ID NO: 93028 - protein, 9 aa, synthetic construct
  source 1..9: note = Seed: VVVGAGDVG (KRAS G13D)
MVVVAVDVN

SEQ ID NO: 93029 - protein, 9 aa, synthetic construct
  source 1..9: note = Seed: VVVGAGDVG (KRAS G13D)
MVVVAVDVS

SEQ ID NO: 93030 - protein, 9 aa, synthetic construct
  source 1..9: note = Seed: VVVGAGDVG (KRAS G13D)
MVVWAADVA

SEQ ID NO: 93031 - protein, 9 aa, synthetic construct
  source 1..9: note = Seed: VVVGAGDVG (KRAS G13D)
MVVWAADVC

SEQ ID NO: 93032 - protein, 9 aa, synthetic construct
  source 1..9: note = Seed: VVVGAGDVG (KRAS G13D)
MVVWAADVD

SEQ ID NO: 93033 - protein, 9 aa, synthetic construct
  source 1..9: note = Seed: VVVGAGDVG (KRAS G13D)
MVVWAADVE

SEQ ID NO: 93034 - protein, 9 aa, synthetic construct
  source 1..9: note = Seed: VVVGAGDVG (KRAS G13D)
MVVWAADVF

SEQ ID NO: 93035 - protein, 9 aa, synthetic construct
  source 1..9: note = Seed: VVVGAGDVG (KRAS G13D)
MVVWAADVG

SEQ ID NO: 93036 - protein, 9 aa, synthetic construct
  source 1..9: note = Seed: VVVGAGDVG (KRAS G13D)
MVVWAADVI

SEQ ID NO: 93037 - protein, 9 aa, synthetic construct
  source 1..9: note = Seed: VVVGAGDVG (KRAS G13D)
MVVWAADVL

SEQ ID NO: 93038 - protein, 9 aa, synthetic construct
  source 1..9: note = Seed: VVVGAGDVG (KRAS G13D)
MVVWAADVM

SEQ ID NO: 93039 - protein, 9 aa, synthetic construct
  source 1..9: note = Seed: VVVGAGDVG (KRAS G13D)
MVVWAADVN

SEQ ID NO: 93040 - protein, 9 aa, synthetic construct
  source 1..9: note = Seed: VVVGAGDVG (KRAS G13D)
MVVWAADVP

SEQ ID NO: 93041 - protein, 9 aa, synthetic construct
  source 1..9: note = Seed: VVVGAGDVG (KRAS G13D)
MVVWAADVQ

SEQ ID NO: 93042 - protein, 9 aa, synthetic construct
  source 1..9: note = Seed: VVVGAGDVG (KRAS G13D)
MVVWAADVS

SEQ ID NO: 93043 - protein, 9 aa, synthetic construct
  source 1..9: note = Seed: VVVGAGDVG (KRAS G13D)
MVVWAADVT

SEQ ID NO: 93044 - protein, 9 aa, synthetic construct
  source 1..9: note = Seed: VVVGAGDVG (KRAS G13D)
MVVWAADVV

SEQ ID NO: 93045 - protein, 9 aa, synthetic construct
  source 1..9: note = Seed: VVVGAGDVG (KRAS G13D)
MVVWAADVW

SEQ ID NO: 93046 - protein, 9 aa, synthetic construct
  source 1..9: note = Seed: VVVGAGDVG (KRAS G13D)
MVVWAADVY

SEQ ID NO: 93047 - protein, 9 aa, synthetic construct
  source 1..9: note = Seed: VVVGAGDVG (KRAS G13D)
MVVWADDVA

SEQ ID NO: 93048 - protein, 9 aa, synthetic construct
  source 1..9: note = Seed: VVVGAGDVG (KRAS G13D)
MVVWADDVC

SEQ ID NO: 93049 - protein, 9 aa, synthetic construct
  source 1..9: note = Seed: VVVGAGDVG (KRAS G13D)
MVVWADDVD

SEQ ID NO: 93050 - protein, 9 aa, synthetic construct
  source 1..9: note = Seed: VVVGAGDVG (KRAS G13D)
MVVWADDVE

SEQ ID NO: 93051 - protein, 9 aa, synthetic construct
  source 1..9: note = Seed: VVVGAGDVG (KRAS G13D)
MVVWADDVF

SEQ ID NO: 93052 - protein, 9 aa, synthetic construct
  source 1..9: note = Seed: VVVGAGDVG (KRAS G13D)
MVVWADDVG

SEQ ID NO: 93053 - protein, 9 aa, synthetic construct
  source 1..9: note = Seed: VVVGAGDVG (KRAS G13D)
MVVWADDVH

SEQ ID NO: 93054 - protein, 9 aa, synthetic construct
  source 1..9: note = Seed: VVVGAGDVG (KRAS G13D)
MVVWADDVI

SEQ ID NO: 93055 - protein, 9 aa, synthetic construct
  source 1..9: note = Seed: VVVGAGDVG (KRAS G13D)
MVVWADDVK

SEQ ID NO: 93056 - protein, 9 aa, synthetic construct
  source 1..9: note = Seed: VVVGAGDVG (KRAS G13D)
MVVWADDVL

SEQ ID NO: 93057 - protein, 9 aa, synthetic construct
  source 1..9: note = Seed: VVVGAGDVG (KRAS G13D)
MVVWADDVM

SEQ ID NO: 93058 - protein, 9 aa, synthetic construct
  source 1..9: note = Seed: VVVGAGDVG (KRAS G13D)
MVVWADDVN

SEQ ID NO: 93059 - protein, 9 aa, synthetic construct
  source 1..9: note = Seed: VVVGAGDVG (KRAS G13D)
MVVWADDVP

SEQ ID NO: 93060 - protein, 9 aa, synthetic construct
  source 1..9: note = Seed: VVVGAGDVG (KRAS G13D)
MVVWADDVQ

SEQ ID NO: 93061 - protein, 9 aa, synthetic construct
  source 1..9: note = Seed: VVVGAGDVG (KRAS G13D)
MVVWADDVR

SEQ ID NO: 93062 - protein, 9 aa, synthetic construct
  source 1..9: note = Seed: VVVGAGDVG (KRAS G13D)
MVVWADDVS

SEQ ID NO: 93063 - protein, 9 aa, synthetic construct
  source 1..9: note = Seed: VVVGAGDVG (KRAS G13D)
MVVWADDVT

SEQ ID NO: 93064 - protein, 9 aa, synthetic construct
  source 1..9: note = Seed: VVVGAGDVG (KRAS G13D)
MVVWADDVV

SEQ ID NO: 93065 - protein, 9 aa, synthetic construct
  source 1..9: note = Seed: VVVGAGDVG (KRAS G13D)
MVVWADDVW

SEQ ID NO: 93066 - protein, 9 aa, synthetic construct
  source 1..9: note = Seed: VVVGAGDVG (KRAS G13D)
MVVWADDVY

SEQ ID NO: 93067 - protein, 9 aa, synthetic construct
  source 1..9: note = Seed: VVVGAGDVG (KRAS G13D)
MVVWAEDVA

SEQ ID NO: 93068 - protein, 9 aa, synthetic construct
  source 1..9: note = Seed: VVVGAGDVG (KRAS G13D)
MVVWAEDVF

SEQ ID NO: 93069 - protein, 9 aa, synthetic construct
  source 1..9: note = Seed: VVVGAGDVG (KRAS G13D)
MVVWAEDVI

SEQ ID NO: 93070 - protein, 9 aa, synthetic construct
  source 1..9: note = Seed: VVVGAGDVG (KRAS G13D)
MVVWAEDVL

SEQ ID NO: 93071 - protein, 9 aa, synthetic construct
  source 1..9: note = Seed: VVVGAGDVG (KRAS G13D)
MVVWAEDVM

SEQ ID NO: 93072 - protein, 9 aa, synthetic construct
  source 1..9: note = Seed: VVVGAGDVG (KRAS G13D)
MVVWAEDVQ

SEQ ID NO: 93073 - protein, 9 aa, synthetic construct
  source 1..9: note = Seed: VVVGAGDVG (KRAS G13D)
MVVWAEDVS

SEQ ID NO: 93074 - protein, 9 aa, synthetic construct
  source 1..9: note = Seed: VVVGAGDVG (KRAS G13D)
MVVWAEDVT

SEQ ID NO: 93075 - protein, 9 aa, synthetic construct
  source 1..9: note = Seed: VVVGAGDVG (KRAS G13D)
MVVWAEDVV

SEQ ID NO: 93076 - protein, 9 aa, synthetic construct
  source 1..9: note = Seed: VVVGAGDVG (KRAS G13D)
MVVWAEDVW

SEQ ID NO: 93077 - protein, 9 aa, synthetic construct
  source 1..9: note = Seed: VVVGAGDVG (KRAS G13D)
MVVWAEDVY

SEQ ID NO: 93078 - protein, 9 aa, synthetic construct
  source 1..9: note = Seed: VVVGAGDVG (KRAS G13D)
MVVWAGDVA

SEQ ID NO: 93079 - protein, 9 aa, synthetic construct
  source 1..9: note = Seed: VVVGAGDVG (KRAS G13D)
MVVWAGDVF

SEQ ID NO: 93080 - protein, 9 aa, synthetic construct
  source 1..9: note = Seed: VVVGAGDVG (KRAS G13D)
MVVWAGDVI

SEQ ID NO: 93081 - protein, 9 aa, synthetic construct
  source 1..9: note = Seed: VVVGAGDVG (KRAS G13D)
MVVWAGDVL

SEQ ID NO: 93082 - protein, 9 aa, synthetic construct
  source 1..9: note = Seed: VVVGAGDVG (KRAS G13D)
MVVWAGDVM

SEQ ID NO: 93083 - protein, 9 aa, synthetic construct
  source 1..9: note = Seed: VVVGAGDVG (KRAS G13D)
MVVWAGDVS

SEQ ID NO: 93084 - protein, 9 aa, synthetic construct
  source 1..9: note = Seed: VVVGAGDVG (KRAS G13D)
MVVWAGDVV

SEQ ID NO: 93085 - protein, 9 aa, synthetic construct
  source 1..9: note = Seed: VVVGAGDVG (KRAS G13D)
MVVWAGDVY

SEQ ID NO: 93086 - protein, 9 aa, synthetic construct
  source 1..9: note = Seed: VVVGAGDVG (KRAS G13D)
MVVWAHDVA

SEQ ID NO: 93087 - protein, 9 aa, synthetic construct
  source 1..9: note = Seed: VVVGAGDVG (KRAS G13D)
MVVWAHDVF

SEQ ID NO: 93088 - protein, 9 aa, synthetic construct
  source 1..9: note = Seed: VVVGAGDVG (KRAS G13D)
MVVWAHDVG

SEQ ID NO: 93089 - protein, 9 aa, synthetic construct
  source 1..9: note = Seed: VVVGAGDVG (KRAS G13D)
MVVWAHDVI

SEQ ID NO: 93090 - protein, 9 aa, synthetic construct
  source 1..9: note = Seed: VVVGAGDVG (KRAS G13D)
MVVWAHDVL

SEQ ID NO: 93091 - protein, 9 aa, synthetic construct
  source 1..9: note = Seed: VVVGAGDVG (KRAS G13D)
MVVWAHDVM

SEQ ID NO: 93092 - protein, 9 aa, synthetic construct
  source 1..9: note = Seed: VVVGAGDVG (KRAS G13D)
MVVWAHDVQ

SEQ ID NO: 93093 - protein, 9 aa, synthetic construct
  source 1..9: note = Seed: VVVGAGDVG (KRAS G13D)
MVVWAHDVS

SEQ ID NO: 93094 - protein, 9 aa, synthetic construct
  source 1..9: note = Seed: VVVGAGDVG (KRAS G13D)
MVVWAHDVV

SEQ ID NO: 93095 - protein, 9 aa, synthetic construct
  source 1..9: note = Seed: VVVGAGDVG (KRAS G13D)
MVVWAHDVY

SEQ ID NO: 93096 - protein, 9 aa, synthetic construct
  source 1..9: note = Seed: VVVGAGDVG (KRAS G13D)
MVVWAIDVA

SEQ ID NO: 93097 - protein, 9 aa, synthetic construct
  source 1..9: note = Seed: VVVGAGDVG (KRAS G13D)
MVVWAIDVD

SEQ ID NO: 93098 - protein, 9 aa, synthetic construct
  source 1..9: note = Seed: VVVGAGDVG (KRAS G13D)
MVVWAIDVE

SEQ ID NO: 93099 - protein, 9 aa, synthetic construct
  source 1..9: note = Seed: VVVGAGDVG (KRAS G13D)
MVVWAIDVF

SEQ ID NO: 93100 - protein, 9 aa, synthetic construct
  source 1..9: note = Seed: VVVGAGDVG (KRAS G13D)
MVVWAIDVG

SEQ ID NO: 93101 - protein, 9 aa, synthetic construct
  source 1..9: note = Seed: VVVGAGDVG (KRAS G13D)
MVVWAIDVI

SEQ ID NO: 93102 - protein, 9 aa, synthetic construct
  source 1..9: note = Seed: VVVGAGDVG (KRAS G13D)
MVVWAIDVK

SEQ ID NO: 93103 - protein, 9 aa, synthetic construct
  source 1..9: note = Seed: VVVGAGDVG (KRAS G13D)
MVVWAIDVL

SEQ ID NO: 93104 - protein, 9 aa, synthetic construct
  source 1..9: note = Seed: VVVGAGDVG (KRAS G13D)
MVVWAIDVM

SEQ ID NO: 93105 - protein, 9 aa, synthetic construct
  source 1..9: note = Seed: VVVGAGDVG (KRAS G13D)
MVVWAIDVN

SEQ ID NO: 93106 - protein, 9 aa, synthetic construct
  source 1..9: note = Seed: VVVGAGDVG (KRAS G13D)
MVVWAIDVQ

SEQ ID NO: 93107 - protein, 9 aa, synthetic construct
  source 1..9: note = Seed: VVVGAGDVG (KRAS G13D)
MVVWAIDVR

SEQ ID NO: 93108 - protein, 9 aa, synthetic construct
  source 1..9: note = Seed: VVVGAGDVG (KRAS G13D)
MVVWAIDVS

SEQ ID NO: 93109 - protein, 9 aa, synthetic construct
  source 1..9: note = Seed: VVVGAGDVG (KRAS G13D)
MVVWAIDVT

SEQ ID NO: 93110 - protein, 9 aa, synthetic construct
  source 1..9: note = Seed: VVVGAGDVG (KRAS G13D)
MVVWAIDVV

SEQ ID NO: 93111 - protein, 9 aa, synthetic construct
  source 1..9: note = Seed: VVVGAGDVG (KRAS G13D)
MVVWAIDVY

SEQ ID NO: 93112 - protein, 9 aa, synthetic construct
  source 1..9: note = Seed: VVVGAGDVG (KRAS G13D)
MVVWALDVA

SEQ ID NO: 93113 - protein, 9 aa, synthetic construct
  source 1..9: note = Seed: VVVGAGDVG (KRAS G13D)
MVVWALDVD

SEQ ID NO: 93114 - protein, 9 aa, synthetic construct
  source 1..9: note = Seed: VVVGAGDVG (KRAS G13D)
MVVWALDVE

SEQ ID NO: 93115 - protein, 9 aa, synthetic construct
  source 1..9: note = Seed: VVVGAGDVG (KRAS G13D)
MVVWALDVF

SEQ ID NO: 93116 - protein, 9 aa, synthetic construct
  source 1..9: note = Seed: VVVGAGDVG (KRAS G13D)
MVVWALDVH

SEQ ID NO: 93117 - protein, 9 aa, synthetic construct
  source 1..9: note = Seed: VVVGAGDVG (KRAS G13D)
MVVWALDVI

SEQ ID NO: 93118 - protein, 9 aa, synthetic construct
  source 1..9: note = Seed: VVVGAGDVG (KRAS G13D)
MVVWALDVL

SEQ ID NO: 93119 - protein, 9 aa, synthetic construct
  source 1..9: note = Seed: VVVGAGDVG (KRAS G13D)
MVVWALDVM

SEQ ID NO: 93120 - protein, 9 aa, synthetic construct
  source 1..9: note = Seed: VVVGAGDVG (KRAS G13D)
MVVWALDVN

SEQ ID NO: 93121 - protein, 9 aa, synthetic construct
  source 1..9: note = Seed: VVVGAGDVG (KRAS G13D)
MVVWALDVP

SEQ ID NO: 93122 - protein, 9 aa, synthetic construct
  source 1..9: note = Seed: VVVGAGDVG (KRAS G13D)
MVVWALDVQ

SEQ ID NO: 93123 - protein, 9 aa, synthetic construct
  source 1..9: note = Seed: VVVGAGDVG (KRAS G13D)
MVVWALDVR

SEQ ID NO: 93124 - protein, 9 aa, synthetic construct
  source 1..9: note = Seed: VVVGAGDVG (KRAS G13D)
MVVWALDVS

SEQ ID NO: 93125 - protein, 9 aa, synthetic construct
  source 1..9: note = Seed: VVVGAGDVG (KRAS G13D)
MVVWALDVT

SEQ ID NO: 93126 - protein, 9 aa, synthetic construct
  source 1..9: note = Seed: VVVGAGDVG (KRAS G13D)
MVVWALDVV

SEQ ID NO: 93127 - protein, 9 aa, synthetic construct
  source 1..9: note = Seed: VVVGAGDVG (KRAS G13D)
MVVWALDVY

SEQ ID NO: 93128 - protein, 9 aa, synthetic construct
  source 1..9: note = Seed: VVVGAGDVG (KRAS G13D)
MVVWAMDVA

SEQ ID NO: 93129 - protein, 9 aa, synthetic construct
  source 1..9: note = Seed: VVVGAGDVG (KRAS G13D)
MVVWAMDVE

SEQ ID NO: 93130 - protein, 9 aa, synthetic construct
  source 1..9: note = Seed: VVVGAGDVG (KRAS G13D)
MVVWAMDVF

SEQ ID NO: 93131 - protein, 9 aa, synthetic construct
  source 1..9: note = Seed: VVVGAGDVG (KRAS G13D)
MVVWAMDVG

SEQ ID NO: 93132 - protein, 9 aa, synthetic construct
  source 1..9: note = Seed: VVVGAGDVG (KRAS G13D)
MVVWAMDVI

SEQ ID NO: 93133 - protein, 9 aa, synthetic construct
  source 1..9: note = Seed: VVVGAGDVG (KRAS G13D)
MVVWAMDVK

SEQ ID NO: 93134 - protein, 9 aa, synthetic construct
  source 1..9: note = Seed: VVVGAGDVG (KRAS G13D)
MVVWAMDVL

SEQ ID NO: 93135 - protein, 9 aa, synthetic construct
  source 1..9: note = Seed: VVVGAGDVG (KRAS G13D)
MVVWAMDVM

SEQ ID NO: 93136 - protein, 9 aa, synthetic construct
  source 1..9: note = Seed: VVVGAGDVG (KRAS G13D)
MVVWAMDVN

SEQ ID NO: 93137 - protein, 9 aa, synthetic construct
  source 1..9: note = Seed: VVVGAGDVG (KRAS G13D)
MVVWAMDVQ

SEQ ID NO: 93138 - protein, 9 aa, synthetic construct
  source 1..9: note = Seed: VVVGAGDVG (KRAS G13D)
MVVWAMDVR

SEQ ID NO: 93139 - protein, 9 aa, synthetic construct
  source 1..9: note = Seed: VVVGAGDVG (KRAS G13D)
MVVWAMDVS

SEQ ID NO: 93140 - protein, 9 aa, synthetic construct
  source 1..9: note = Seed: VVVGAGDVG (KRAS G13D)
MVVWAMDVT

SEQ ID NO: 93141 - protein, 9 aa, synthetic construct
  source 1..9: note = Seed: VVVGAGDVG (KRAS G13D)
MVVWAMDVV

SEQ ID NO: 93142 - protein, 9 aa, synthetic construct
  source 1..9: note = Seed: VVVGAGDVG (KRAS G13D)
MVVWAMDVW

SEQ ID NO: 93143 - protein, 9 aa, synthetic construct
  source 1..9: note = Seed: VVVGAGDVG (KRAS G13D)
MVVWAMDVY

SEQ ID NO: 93144 - protein, 9 aa, synthetic construct
  source 1..9: note = Seed: VVVGAGDVG (KRAS G13D)
MVVWANDVA

SEQ ID NO: 93145 - protein, 9 aa, synthetic construct
  source 1..9: note = Seed: VVVGAGDVG (KRAS G13D)
MVVWANDVC

SEQ ID NO: 93146 - protein, 9 aa, synthetic construct
  source 1..9: note = Seed: VVVGAGDVG (KRAS G13D)
MVVWANDVD

SEQ ID NO: 93147 - protein, 9 aa, synthetic construct
  source 1..9: note = Seed: VVVGAGDVG (KRAS G13D)
MVVWANDVE

SEQ ID NO: 93148 - protein, 9 aa, synthetic construct
  source 1..9: note = Seed: VVVGAGDVG (KRAS G13D)
MVVWANDVF

SEQ ID NO: 93149 - protein, 9 aa, synthetic construct
  source 1..9: note = Seed: VVVGAGDVG (KRAS G13D)
MVVWANDVG

SEQ ID NO: 93150 - protein, 9 aa, synthetic construct
  source 1..9: note = Seed: VVVGAGDVG (KRAS G13D)
MVVWANDVH

SEQ ID NO: 93151 - protein, 9 aa, synthetic construct
  source 1..9: note = Seed: VVVGAGDVG (KRAS G13D)
MVVWANDVI

SEQ ID NO: 93152 - protein, 9 aa, synthetic construct
  source 1..9: note = Seed: VVVGAGDVG (KRAS G13D)
MVVWANDVL

SEQ ID NO: 93153 - protein, 9 aa, synthetic construct
  source 1..9: note = Seed: VVVGAGDVG (KRAS G13D)
MVVWANDVM

SEQ ID NO: 93154 - protein, 9 aa, synthetic construct
  source 1..9: note = Seed: VVVGAGDVG (KRAS G13D)
MVVWANDVN

SEQ ID NO: 93155 - protein, 9 aa, synthetic construct
  source 1..9: note = Seed: VVVGAGDVG (KRAS G13D)
MVVWANDVQ

SEQ ID NO: 93156 - protein, 9 aa, synthetic construct
  source 1..9: note = Seed: VVVGAGDVG (KRAS G13D)
MVVWANDVR

SEQ ID NO: 93157 - protein, 9 aa, synthetic construct
  source 1..9: note = Seed: VVVGAGDVG (KRAS G13D)
MVVWANDVS

SEQ ID NO: 93158 - protein, 9 aa, synthetic construct
  source 1..9: note = Seed: VVVGAGDVG (KRAS G13D)
MVVWANDVT

SEQ ID NO: 93159 - protein, 9 aa, synthetic construct
  source 1..9: note = Seed: VVVGAGDVG (KRAS G13D)
MVVWANDVV

SEQ ID NO: 93160 - protein, 9 aa, synthetic construct
  source 1..9: note = Seed: VVVGAGDVG (KRAS G13D)
MVVWANDVW

SEQ ID NO: 93161 - protein, 9 aa, synthetic construct
  source 1..9: note = Seed: VVVGAGDVG (KRAS G13D)
MVVWANDVY

SEQ ID NO: 93162 - protein, 9 aa, synthetic construct
  source 1..9: note = Seed: VVVGAGDVG (KRAS G13D)
MVVWAPDVA

SEQ ID NO: 93163 - protein, 9 aa, synthetic construct
  source 1..9: note = Seed: VVVGAGDVG (KRAS G13D)
MVVWAPDVC

SEQ ID NO: 93164 - protein, 9 aa, synthetic construct
  source 1..9: note = Seed: VVVGAGDVG (KRAS G13D)
MVVWAPDVD

SEQ ID NO: 93165 - protein, 9 aa, synthetic construct
  source 1..9: note = Seed: VVVGAGDVG (KRAS G13D)
MVVWAPDVE

SEQ ID NO: 93166 - protein, 9 aa, synthetic construct
  source 1..9: note = Seed: VVVGAGDVG (KRAS G13D)
MVVWAPDVF

SEQ ID NO: 93167 - protein, 9 aa, synthetic construct
  source 1..9: note = Seed: VVVGAGDVG (KRAS G13D)
MVVWAPDVG

SEQ ID NO: 93168 - protein, 9 aa, synthetic construct
  source 1..9: note = Seed: VVVGAGDVG (KRAS G13D)
MVVWAPDVH

SEQ ID NO: 93169 - protein, 9 aa, synthetic construct
  source 1..9: note = Seed: VVVGAGDVG (KRAS G13D)
MVVWAPDVI

SEQ ID NO: 93170 - protein, 9 aa, synthetic construct
  source 1..9: note = Seed: VVVGAGDVG (KRAS G13D)
MVVWAPDVL

SEQ ID NO: 93171 - protein, 9 aa, synthetic construct
  source 1..9: note = Seed: VVVGAGDVG (KRAS G13D)
MVVWAPDVM

SEQ ID NO: 93172 - protein, 9 aa, synthetic construct
  source 1..9: note = Seed: VVVGAGDVG (KRAS G13D)
MVVWAPDVN

SEQ ID NO: 93173 - protein, 9 aa, synthetic construct
  source 1..9: note = Seed: VVVGAGDVG (KRAS G13D)
MVVWAPDVQ

SEQ ID NO: 93174 - protein, 9 aa, synthetic construct
  source 1..9: note = Seed: VVVGAGDVG (KRAS G13D)
MVVWAPDVS

SEQ ID NO: 93175 - protein, 9 aa, synthetic construct
  source 1..9: note = Seed: VVVGAGDVG (KRAS G13D)
MVVWAPDVT

SEQ ID NO: 93176 - protein, 9 aa, synthetic construct
  source 1..9: note = Seed: VVVGAGDVG (KRAS G13D)
MVVWAPDVV

SEQ ID NO: 93177 - protein, 9 aa, synthetic construct
  source 1..9: note = Seed: VVVGAGDVG (KRAS G13D)
MVVWAPDVW

SEQ ID NO: 93178 - protein, 9 aa, synthetic construct
  source 1..9: note = Seed: VVVGAGDVG (KRAS G13D)
MVVWAPDVY

SEQ ID NO: 93179 - protein, 9 aa, synthetic construct
  source 1..9: note = Seed: VVVGAGDVG (KRAS G13D)
MVVWAQDVA

SEQ ID NO: 93180 - protein, 9 aa, synthetic construct
  source 1..9: note = Seed: VVVGAGDVG (KRAS G13D)
MVVWAQDVF

SEQ ID NO: 93181 - protein, 9 aa, synthetic construct
  source 1..9: note = Seed: VVVGAGDVG (KRAS G13D)
MVVWAQDVG

SEQ ID NO: 93182 - protein, 9 aa, synthetic construct
  source 1..9: note = Seed: VVVGAGDVG (KRAS G13D)
MVVWAQDVI

SEQ ID NO: 93183 - protein, 9 aa, synthetic construct
  source 1..9: note = Seed: VVVGAGDVG (KRAS G13D)
MVVWAQDVL

SEQ ID NO: 93184 - protein, 9 aa, synthetic construct
  source 1..9: note = Seed: VVVGAGDVG (KRAS G13D)
MVVWAQDVM

SEQ ID NO: 93185 - protein, 9 aa, synthetic construct
  source 1..9: note = Seed: VVVGAGDVG (KRAS G13D)
MVVWAQDVQ

SEQ ID NO: 93186 - protein, 9 aa, synthetic construct
  source 1..9: note = Seed: VVVGAGDVG (KRAS G13D)
MVVWAQDVS

SEQ ID NO: 93187 - protein, 9 aa, synthetic construct
  source 1..9: note = Seed: VVVGAGDVG (KRAS G13D)
MVVWAQDVV

SEQ ID NO: 93188 - protein, 9 aa, synthetic construct
  source 1..9: note = Seed: VVVGAGDVG (KRAS G13D)
MVVWAQDVY

SEQ ID NO: 93189 - protein, 9 aa, synthetic construct
  source 1..9: note = Seed: VVVGAGDVG (KRAS G13D)
MVVWARDVM

SEQ ID NO: 93190 - protein, 9 aa, synthetic construct
  source 1..9: note = Seed: VVVGAGDVG (KRAS G13D)
MVVWARDVS

SEQ ID NO: 93191 - protein, 9 aa, synthetic construct
  source 1..9: note = Seed: VVVGAGDVG (KRAS G13D)
MVVWASDVA

SEQ ID NO: 93192 - protein, 9 aa, synthetic construct
  source 1..9: note = Seed: VVVGAGDVG (KRAS G13D)
MVVWASDVC

SEQ ID NO: 93193 - protein, 9 aa, synthetic construct
  source 1..9: note = Seed: VVVGAGDVG (KRAS G13D)
MVVWASDVD

SEQ ID NO: 93194 - protein, 9 aa, synthetic construct
  source 1..9: note = Seed: VVVGAGDVG (KRAS G13D)
MVVWASDVE

SEQ ID NO: 93195 - protein, 9 aa, synthetic construct
  source 1..9: note = Seed: VVVGAGDVG (KRAS G13D)
MVVWASDVF

SEQ ID NO: 93196 - protein, 9 aa, synthetic construct
  source 1..9: note = Seed: VVVGAGDVG (KRAS G13D)
MVVWASDVG

SEQ ID NO: 93197 - protein, 9 aa, synthetic construct
  source 1..9: note = Seed: VVVGAGDVG (KRAS G13D)
MVVWASDVI

SEQ ID NO: 93198 - protein, 9 aa, synthetic construct
  source 1..9: note = Seed: VVVGAGDVG (KRAS G13D)
MVVWASDVL

SEQ ID NO: 93199 - protein, 9 aa, synthetic construct
  source 1..9: note = Seed: VVVGAGDVG (KRAS G13D)
MVVWASDVM

SEQ ID NO: 93200 - protein, 9 aa, synthetic construct
  source 1..9: note = Seed: VVVGAGDVG (KRAS G13D)
MVVWASDVN

SEQ ID NO: 93201 - protein, 9 aa, synthetic construct
  source 1..9: note = Seed: VVVGAGDVG (KRAS G13D)
MVVWASDVQ

SEQ ID NO: 93202 - protein, 9 aa, synthetic construct
  source 1..9: note = Seed: VVVGAGDVG (KRAS G13D)
MVVWASDVS

SEQ ID NO: 93203 - protein, 9 aa, synthetic construct
  source 1..9: note = Seed: VVVGAGDVG (KRAS G13D)
MVVWASDVT

SEQ ID NO: 93204 - protein, 9 aa, synthetic construct
  source 1..9: note = Seed: VVVGAGDVG (KRAS G13D)
MVVWASDVV

SEQ ID NO: 93205 - protein, 9 aa, synthetic construct
  source 1..9: note = Seed: VVVGAGDVG (KRAS G13D)
MVVWASDVW

SEQ ID NO: 93206 - protein, 9 aa, synthetic construct
  source 1..9: note = Seed: VVVGAGDVG (KRAS G13D)
MVVWASDVY

SEQ ID NO: 93207 - protein, 9 aa, synthetic construct
  source 1..9: note = Seed: VVVGAGDVG (KRAS G13D)
MVVWATDVA

SEQ ID NO: 93208 - protein, 9 aa, synthetic construct
  source 1..9: note = Seed: VVVGAGDVG (KRAS G13D)
MVVWATDVF

SEQ ID NO: 93209 - protein, 9 aa, synthetic construct
  source 1..9: note = Seed: VVVGAGDVG (KRAS G13D)
MVVWATDVH

SEQ ID NO: 93210 - protein, 9 aa, synthetic construct
  source 1..9: note = Seed: VVVGAGDVG (KRAS G13D)
MVVWATDVI

SEQ ID NO: 93211 - protein, 9 aa, synthetic construct
  source 1..9: note = Seed: VVVGAGDVG (KRAS G13D)
MVVWATDVL

SEQ ID NO: 93212 - protein, 9 aa, synthetic construct
  source 1..9: note = Seed: VVVGAGDVG (KRAS G13D)
MVVWATDVM

SEQ ID NO: 93213 - protein, 9 aa, synthetic construct
  source 1..9: note = Seed: VVVGAGDVG (KRAS G13D)
MVVWATDVN

SEQ ID NO: 93214 - protein, 9 aa, synthetic construct
  source 1..9: note = Seed: VVVGAGDVG (KRAS G13D)
MVVWATDVQ

SEQ ID NO: 93215 - protein, 9 aa, synthetic construct
  source 1..9: note = Seed: VVVGAGDVG (KRAS G13D)
MVVWATDVS

SEQ ID NO: 93216 - protein, 9 aa, synthetic construct
  source 1..9: note = Seed: VVVGAGDVG (KRAS G13D)
MVVWATDVT

SEQ ID NO: 93217 - protein, 9 aa, synthetic construct
  source 1..9: note = Seed: VVVGAGDVG (KRAS G13D)
MVVWATDVV

SEQ ID NO: 93218 - protein, 9 aa, synthetic construct
  source 1..9: note = Seed: VVVGAGDVG (KRAS G13D)
MVVWATDVW

SEQ ID NO: 93219 - protein, 9 aa, synthetic construct
  source 1..9: note = Seed: VVVGAGDVG (KRAS G13D)
MVVWATDVY

SEQ ID NO: 93220 - protein, 9 aa, synthetic construct
  source 1..9: note = Seed: VVVGAGDVG (KRAS G13D)
MVVWAVDVA

SEQ ID NO: 93221 - protein, 9 aa, synthetic construct
  source 1..9: note = Seed: VVVGAGDVG (KRAS G13D)
MVVWAVDVE

SEQ ID NO: 93222 - protein, 9 aa, synthetic construct
  source 1..9: note = Seed: VVVGAGDVG (KRAS G13D)
MVVWAVDVF

SEQ ID NO: 93223 - protein, 9 aa, synthetic construct
  source 1..9: note = Seed: VVVGAGDVG (KRAS G13D)
MVVWAVDVG

SEQ ID NO: 93224 - protein, 9 aa, synthetic construct
  source 1..9: note = Seed: VVVGAGDVG (KRAS G13D)
MVVWAVDVI

SEQ ID NO: 93225 - protein, 9 aa, synthetic construct
  source 1..9: note = Seed: VVVGAGDVG (KRAS G13D)
MVVWAVDVL

SEQ ID NO: 93226 - protein, 9 aa, synthetic construct
  source 1..9: note = Seed: VVVGAGDVG (KRAS G13D)
MVVWAVDVM

SEQ ID NO: 93227 - protein, 9 aa, synthetic construct
  source 1..9: note = Seed: VVVGAGDVG (KRAS G13D)
MVVWAVDVN

SEQ ID NO: 93228 - protein, 9 aa, synthetic construct
  source 1..9: note = Seed: VVVGAGDVG (KRAS G13D)
MVVWAVDVQ

SEQ ID NO: 93229 - protein, 9 aa, synthetic construct
  source 1..9: note = Seed: VVVGAGDVG (KRAS G13D)
MVVWAVDVR

SEQ ID NO: 93230 - protein, 9 aa, synthetic construct
  source 1..9: note = Seed: VVVGAGDVG (KRAS G13D)
MVVWAVDVS

SEQ ID NO: 93231 - protein, 9 aa, synthetic construct
  source 1..9: note = Seed: VVVGAGDVG (KRAS G13D)
MVVWAVDVT

SEQ ID NO: 93232 - protein, 9 aa, synthetic construct
  source 1..9: note = Seed: VVVGAGDVG (KRAS G13D)
MVVWAVDVV

SEQ ID NO: 93233 - protein, 9 aa, synthetic construct
  source 1..9: note = Seed: VVVGAGDVG (KRAS G13D)
MVVWAVDVY

SEQ ID NO: 93234 - protein, 9 aa, synthetic construct
  source 1..9: note = Seed: VVVGAGDVG (KRAS G13D)
MVVYAADVA

SEQ ID NO: 93235 - protein, 9 aa, synthetic construct
  source 1..9: note = Seed: VVVGAGDVG (KRAS G13D)
MVVYAADVC

SEQ ID NO: 93236 - protein, 9 aa, synthetic construct
  source 1..9: note = Seed: VVVGAGDVG (KRAS G13D)
MVVYAADVD

SEQ ID NO: 93237 - protein, 9 aa, synthetic construct
  source 1..9: note = Seed: VVVGAGDVG (KRAS G13D)
MVVYAADVE

SEQ ID NO: 93238 - protein, 9 aa, synthetic construct
  source 1..9: note = Seed: VVVGAGDVG (KRAS G13D)
MVVYAADVF

SEQ ID NO: 93239 - protein, 9 aa, synthetic construct
  source 1..9: note = Seed: VVVGAGDVG (KRAS G13D)
MVVYAADVG

SEQ ID NO: 93240 - protein, 9 aa, synthetic construct
  source 1..9: note = Seed: VVVGAGDVG (KRAS G13D)
MVVYAADVI

SEQ ID NO: 93241 - protein, 9 aa, synthetic construct
  source 1..9: note = Seed: VVVGAGDVG (KRAS G13D)
MVVYAADVK

SEQ ID NO: 93242 - protein, 9 aa, synthetic construct
  source 1..9: note = Seed: VVVGAGDVG (KRAS G13D)
MVVYAADVL

SEQ ID NO: 93243 - protein, 9 aa, synthetic construct
  source 1..9: note = Seed: VVVGAGDVG (KRAS G13D)
MVVYAADVM

SEQ ID NO: 93244 - protein, 9 aa, synthetic construct
  source 1..9: note = Seed: VVVGAGDVG (KRAS G13D)
MVVYAADVN

SEQ ID NO: 93245 - protein, 9 aa, synthetic construct
  source 1..9: note = Seed: VVVGAGDVG (KRAS G13D)
MVVYAADVQ

SEQ ID NO: 93246 - protein, 9 aa, synthetic construct
  source 1..9: note = Seed: VVVGAGDVG (KRAS G13D)
MVVYAADVR

SEQ ID NO: 93247 - protein, 9 aa, synthetic construct
  source 1..9: note = Seed: VVVGAGDVG (KRAS G13D)
MVVYAADVS

SEQ ID NO: 93248 - protein, 9 aa, synthetic construct
  source 1..9: note = Seed: VVVGAGDVG (KRAS G13D)
MVVYAADVT

SEQ ID NO: 93249 - protein, 9 aa, synthetic construct
  source 1..9: note = Seed: VVVGAGDVG (KRAS G13D)
MVVYAADVV

SEQ ID NO: 93250 - protein, 9 aa, synthetic construct
  source 1..9: note = Seed: VVVGAGDVG (KRAS G13D)
MVVYAADVY

SEQ ID NO: 93251 - protein, 9 aa, synthetic construct
  source 1..9: note = Seed: VVVGAGDVG (KRAS G13D)
MVVYADDVA

SEQ ID NO: 93252 - protein, 9 aa, synthetic construct
  source 1..9: note = Seed: VVVGAGDVG (KRAS G13D)
MVVYADDVC

SEQ ID NO: 93253 - protein, 9 aa, synthetic construct
  source 1..9: note = Seed: VVVGAGDVG (KRAS G13D)
MVVYADDVE

SEQ ID NO: 93254 - protein, 9 aa, synthetic construct
  source 1..9: note = Seed: VVVGAGDVG (KRAS G13D)
MVVYADDVF

SEQ ID NO: 93255 - protein, 9 aa, synthetic construct
  source 1..9: note = Seed: VVVGAGDVG (KRAS G13D)
MVVYADDVG

SEQ ID NO: 93256 - protein, 9 aa, synthetic construct
  source 1..9: note = Seed: VVVGAGDVG (KRAS G13D)
MVVYADDVH

SEQ ID NO: 93257 - protein, 9 aa, synthetic construct
  source 1..9: note = Seed: VVVGAGDVG (KRAS G13D)
MVVYADDVI

SEQ ID NO: 93258 - protein, 9 aa, synthetic construct
  source 1..9: note = Seed: VVVGAGDVG (KRAS G13D)
MVVYADDVL

SEQ ID NO: 93259 - protein, 9 aa, synthetic construct
  source 1..9: note = Seed: VVVGAGDVG (KRAS G13D)
MVVYADDVM

SEQ ID NO: 93260 - protein, 9 aa, synthetic construct
  source 1..9: note = Seed: VVVGAGDVG (KRAS G13D)
MVVYADDVN

SEQ ID NO: 93261 - protein, 9 aa, synthetic construct
  source 1..9: note = Seed: VVVGAGDVG (KRAS G13D)
MVVYADDVP

SEQ ID NO: 93262 - protein, 9 aa, synthetic construct
  source 1..9: note = Seed: VVVGAGDVG (KRAS G13D)
MVVYADDVQ

SEQ ID NO: 93263 - protein, 9 aa, synthetic construct
  source 1..9: note = Seed: VVVGAGDVG (KRAS G13D)
MVVYADDVR

SEQ ID NO: 93264 - protein, 9 aa, synthetic construct
  source 1..9: note = Seed: VVVGAGDVG (KRAS G13D)
MVVYADDVS

SEQ ID NO: 93265 - protein, 9 aa, synthetic construct
  source 1..9: note = Seed: VVVGAGDVG (KRAS G13D)
MVVYADDVT

SEQ ID NO: 93266 - protein, 9 aa, synthetic construct
  source 1..9: note = Seed: VVVGAGDVG (KRAS G13D)
MVVYADDVV

SEQ ID NO: 93267 - protein, 9 aa, synthetic construct
  source 1..9: note = Seed: VVVGAGDVG (KRAS G13D)
MVVYADDVW

SEQ ID NO: 93268 - protein, 9 aa, synthetic construct
  source 1..9: note = Seed: VVVGAGDVG (KRAS G13D)
MVVYADDVY

SEQ ID NO: 93269 - protein, 9 aa, synthetic construct
  source 1..9: note = Seed: VVVGAGDVG (KRAS G13D)
MVVYAEDVA

SEQ ID NO: 93270 - protein, 9 aa, synthetic construct
  source 1..9: note = Seed: VVVGAGDVG (KRAS G13D)
MVVYAEDVF

SEQ ID NO: 93271 - protein, 9 aa, synthetic construct
  source 1..9: note = Seed: VVVGAGDVG (KRAS G13D)
MVVYAEDVI

SEQ ID NO: 93272 - protein, 9 aa, synthetic construct
  source 1..9: note = Seed: VVVGAGDVG (KRAS G13D)
MVVYAEDVL

SEQ ID NO: 93273 - protein, 9 aa, synthetic construct
  source 1..9: note = Seed: VVVGAGDVG (KRAS G13D)
MVVYAEDVM

SEQ ID NO: 93274 - protein, 9 aa, synthetic construct
  source 1..9: note = Seed: VVVGAGDVG (KRAS G13D)
MVVYAEDVS

SEQ ID NO: 93275 - protein, 9 aa, synthetic construct
  source 1..9: note = Seed: VVVGAGDVG (KRAS G13D)
MVVYAEDVV

SEQ ID NO: 93276 - protein, 9 aa, synthetic construct
  source 1..9: note = Seed: VVVGAGDVG (KRAS G13D)
MVVYAEDVY

SEQ ID NO: 93277 - protein, 9 aa, synthetic construct
  source 1..9: note = Seed: VVVGAGDVG (KRAS G13D)
MVVYAGDVA

SEQ ID NO: 93278 - protein, 9 aa, synthetic construct
  source 1..9: note = Seed: VVVGAGDVG (KRAS G13D)
MVVYAGDVI

SEQ ID NO: 93279 - protein, 9 aa, synthetic construct
  source 1..9: note = Seed: VVVGAGDVG (KRAS G13D)
MVVYAGDVL

SEQ ID NO: 93280 - protein, 9 aa, synthetic construct
  source 1..9: note = Seed: VVVGAGDVG (KRAS G13D)
MVVYAGDVM

SEQ ID NO: 93281 - protein, 9 aa, synthetic construct
  source 1..9: note = Seed: VVVGAGDVG (KRAS G13D)
MVVYAGDVS

SEQ ID NO: 93282 - protein, 9 aa, synthetic construct
  source 1..9: note = Seed: VVVGAGDVG (KRAS G13D)
MVVYAGDVV

SEQ ID NO: 93283 - protein, 9 aa, synthetic construct
  source 1..9: note = Seed: VVVGAGDVG (KRAS G13D)
MVVYAIDVA

SEQ ID NO: 93284 - protein, 9 aa, synthetic construct
  source 1..9: note = Seed: VVVGAGDVG (KRAS G13D)
MVVYAIDVD

SEQ ID NO: 93285 - protein, 9 aa, synthetic construct
  source 1..9: note = Seed: VVVGAGDVG (KRAS G13D)
MVVYAIDVE

SEQ ID NO: 93286 - protein, 9 aa, synthetic construct
  source 1..9: note = Seed: VVVGAGDVG (KRAS G13D)
MVVYAIDVF

SEQ ID NO: 93287 - protein, 9 aa, synthetic construct
  source 1..9: note = Seed: VVVGAGDVG (KRAS G13D)
MVVYAIDVG

SEQ ID NO: 93288 - protein, 9 aa, synthetic construct
  source 1..9: note = Seed: VVVGAGDVG (KRAS G13D)
MVVYAIDVH

SEQ ID NO: 93289 - protein, 9 aa, synthetic construct
  source 1..9: note = Seed: VVVGAGDVG (KRAS G13D)
MVVYAIDVI

SEQ ID NO: 93290 - protein, 9 aa, synthetic construct
  source 1..9: note = Seed: VVVGAGDVG (KRAS G13D)
MVVYAIDVK

SEQ ID NO: 93291 - protein, 9 aa, synthetic construct
  source 1..9: note = Seed: VVVGAGDVG (KRAS G13D)
MVVYAIDVL

SEQ ID NO: 93292 - protein, 9 aa, synthetic construct
  source 1..9: note = Seed: VVVGAGDVG (KRAS G13D)
MVVYAIDVM

SEQ ID NO: 93293 - protein, 9 aa, synthetic construct
  source 1..9: note = Seed: VVVGAGDVG (KRAS G13D)
MVVYAIDVN

SEQ ID NO: 93294 - protein, 9 aa, synthetic construct
  source 1..9: note = Seed: VVVGAGDVG (KRAS G13D)
MVVYAIDVQ

SEQ ID NO: 93295 - protein, 9 aa, synthetic construct
  source 1..9: note = Seed: VVVGAGDVG (KRAS G13D)
MVVYAIDVR

SEQ ID NO: 93296 - protein, 9 aa, synthetic construct
  source 1..9: note = Seed: VVVGAGDVG (KRAS G13D)
MVVYAIDVS

SEQ ID NO: 93297 - protein, 9 aa, synthetic construct
  source 1..9: note = Seed: VVVGAGDVG (KRAS G13D)
MVVYAIDVT

SEQ ID NO: 93298 - protein, 9 aa, synthetic construct
  source 1..9: note = Seed: VVVGAGDVG (KRAS G13D)
MVVYAIDVV

SEQ ID NO: 93299 - protein, 9 aa, synthetic construct
  source 1..9: note = Seed: VVVGAGDVG (KRAS G13D)
MVVYAIDVY

SEQ ID NO: 93300 - protein, 9 aa, synthetic construct
  source 1..9: note = Seed: VVVGAGDVG (KRAS G13D)
MVVYALDVA

SEQ ID NO: 93301 - protein, 9 aa, synthetic construct
  source 1..9: note = Seed: VVVGAGDVG (KRAS G13D)
MVVYALDVD

SEQ ID NO: 93302 - protein, 9 aa, synthetic construct
  source 1..9: note = Seed: VVVGAGDVG (KRAS G13D)
MVVYALDVE

SEQ ID NO: 93303 - protein, 9 aa, synthetic construct
  source 1..9: note = Seed: VVVGAGDVG (KRAS G13D)
MVVYALDVF

SEQ ID NO: 93304 - protein, 9 aa, synthetic construct
  source 1..9: note = Seed: VVVGAGDVG (KRAS G13D)
MVVYALDVH

SEQ ID NO: 93305 - protein, 9 aa, synthetic construct
  source 1..9: note = Seed: VVVGAGDVG (KRAS G13D)
MVVYALDVI

SEQ ID NO: 93306 - protein, 9 aa, synthetic construct
  source 1..9: note = Seed: VVVGAGDVG (KRAS G13D)
MVVYALDVL

SEQ ID NO: 93307 - protein, 9 aa, synthetic construct
  source 1..9: note = Seed: VVVGAGDVG (KRAS G13D)
MVVYALDVM

SEQ ID NO: 93308 - protein, 9 aa, synthetic construct
  source 1..9: note = Seed: VVVGAGDVG (KRAS G13D)
MVVYALDVN

SEQ ID NO: 93309 - protein, 9 aa, synthetic construct
  source 1..9: note = Seed: VVVGAGDVG (KRAS G13D)
MVVYALDVP

SEQ ID NO: 93310 - protein, 9 aa, synthetic construct
  source 1..9: note = Seed: VVVGAGDVG (KRAS G13D)
MVVYALDVQ

SEQ ID NO: 93311 - protein, 9 aa, synthetic construct
  source 1..9: note = Seed: VVVGAGDVG (KRAS G13D)
MVVYALDVR

SEQ ID NO: 93312 - protein, 9 aa, synthetic construct
  source 1..9: note = Seed: VVVGAGDVG (KRAS G13D)
MVVYALDVS

SEQ ID NO: 93313 - protein, 9 aa, synthetic construct
  source 1..9: note = Seed: VVVGAGDVG (KRAS G13D)
MVVYALDVT

SEQ ID NO: 93314 - protein, 9 aa, synthetic construct
  source 1..9: note = Seed: VVVGAGDVG (KRAS G13D)
MVVYALDVV

SEQ ID NO: 93315 - protein, 9 aa, synthetic construct
  source 1..9: note = Seed: VVVGAGDVG (KRAS G13D)
MVVYALDVY

SEQ ID NO: 93316 - protein, 9 aa, synthetic construct
  source 1..9: note = Seed: VVVGAGDVG (KRAS G13D)
MVVYAMDVA

SEQ ID NO: 93317 - protein, 9 aa, synthetic construct
  source 1..9: note = Seed: VVVGAGDVG (KRAS G13D)
MVVYAMDVE

SEQ ID NO: 93318 - protein, 9 aa, synthetic construct
  source 1..9: note = Seed: VVVGAGDVG (KRAS G13D)
MVVYAMDVF

SEQ ID NO: 93319 - protein, 9 aa, synthetic construct
  source 1..9: note = Seed: VVVGAGDVG (KRAS G13D)
MVVYAMDVG

SEQ ID NO: 93320 - protein, 9 aa, synthetic construct
  source 1..9: note = Seed: VVVGAGDVG (KRAS G13D)
MVVYAMDVI

SEQ ID NO: 93321 - protein, 9 aa, synthetic construct
  source 1..9: note = Seed: VVVGAGDVG (KRAS G13D)
MVVYAMDVK

SEQ ID NO: 93322 - protein, 9 aa, synthetic construct
  source 1..9: note = Seed: VVVGAGDVG (KRAS G13D)
MVVYAMDVL

SEQ ID NO: 93323 - protein, 9 aa, synthetic construct
  source 1..9: note = Seed: VVVGAGDVG (KRAS G13D)
MVVYAMDVM

SEQ ID NO: 93324 - protein, 9 aa, synthetic construct
  source 1..9: note = Seed: VVVGAGDVG (KRAS G13D)
MVVYAMDVQ

SEQ ID NO: 93325 - protein, 9 aa, synthetic construct
  source 1..9: note = Seed: VVVGAGDVG (KRAS G13D)
MVVYAMDVR

SEQ ID NO: 93326 - protein, 9 aa, synthetic construct
  source 1..9: note = Seed: VVVGAGDVG (KRAS G13D)
MVVYAMDVS

SEQ ID NO: 93327 - protein, 9 aa, synthetic construct
  source 1..9: note = Seed: VVVGAGDVG (KRAS G13D)
MVVYAMDVT

SEQ ID NO: 93328 - protein, 9 aa, synthetic construct
  source 1..9: note = Seed: VVVGAGDVG (KRAS G13D)
MVVYAMDVV

SEQ ID NO: 93329 - protein, 9 aa, synthetic construct
  source 1..9: note = Seed: VVVGAGDVG (KRAS G13D)
MVVYAMDVY

SEQ ID NO: 93330 - protein, 9 aa, synthetic construct
  source 1..9: note = Seed: VVVGAGDVG (KRAS G13D)
MVVYANDVA

SEQ ID NO: 93331 - protein, 9 aa, synthetic construct
  source 1..9: note = Seed: VVVGAGDVG (KRAS G13D)
MVVYANDVC

SEQ ID NO: 93332 - protein, 9 aa, synthetic construct
  source 1..9: note = Seed: VVVGAGDVG (KRAS G13D)
MVVYANDVD

SEQ ID NO: 93333 - protein, 9 aa, synthetic construct
  source 1..9: note = Seed: VVVGAGDVG (KRAS G13D)
MVVYANDVE

SEQ ID NO: 93334 - protein, 9 aa, synthetic construct
  source 1..9: note = Seed: VVVGAGDVG (KRAS G13D)
MVVYANDVF

SEQ ID NO: 93335 - protein, 9 aa, synthetic construct
  source 1..9: note = Seed: VVVGAGDVG (KRAS G13D)
MVVYANDVG

SEQ ID NO: 93336 - protein, 9 aa, synthetic construct
  source 1..9: note = Seed: VVVGAGDVG (KRAS G13D)
MVVYANDVH

SEQ ID NO: 93337 - protein, 9 aa, synthetic construct
  source 1..9: note = Seed: VVVGAGDVG (KRAS G13D)
MVVYANDVI

SEQ ID NO: 93338 - protein, 9 aa, synthetic construct
  source 1..9: note = Seed: VVVGAGDVG (KRAS G13D)
MVVYANDVL

SEQ ID NO: 93339 - protein, 9 aa, synthetic construct
  source 1..9: note = Seed: VVVGAGDVG (KRAS G13D)
MVVYANDVM

SEQ ID NO: 93340 - protein, 9 aa, synthetic construct
  source 1..9: note = Seed: VVVGAGDVG (KRAS G13D)
MVVYANDVN

SEQ ID NO: 93341 - protein, 9 aa, synthetic construct
  source 1..9: note = Seed: VVVGAGDVG (KRAS G13D)
MVVYANDVQ

SEQ ID NO: 93342 - protein, 9 aa, synthetic construct
  source 1..9: note = Seed: VVVGAGDVG (KRAS G13D)
MVVYANDVS

SEQ ID NO: 93343 - protein, 9 aa, synthetic construct
  source 1..9: note = Seed: VVVGAGDVG (KRAS G13D)
MVVYANDVT

SEQ ID NO: 93344 - protein, 9 aa, synthetic construct
  source 1..9: note = Seed: VVVGAGDVG (KRAS G13D)
MVVYANDVV

SEQ ID NO: 93345 - protein, 9 aa, synthetic construct
  source 1..9: note = Seed: VVVGAGDVG (KRAS G13D)
MVVYANDVW

SEQ ID NO: 93346 - protein, 9 aa, synthetic construct
  source 1..9: note = Seed: VVVGAGDVG (KRAS G13D)
MVVYANDVY

SEQ ID NO: 93347 - protein, 9 aa, synthetic construct
  source 1..9: note = Seed: VVVGAGDVG (KRAS G13D)
MVVYAPDVA

SEQ ID NO: 93348 - protein, 9 aa, synthetic construct
  source 1..9: note = Seed: VVVGAGDVG (KRAS G13D)
MVVYAPDVC

SEQ ID NO: 93349 - protein, 9 aa, synthetic construct
  source 1..9: note = Seed: VVVGAGDVG (KRAS G13D)
MVVYAPDVD

SEQ ID NO: 93350 - protein, 9 aa, synthetic construct
  source 1..9: note = Seed: VVVGAGDVG (KRAS G13D)
MVVYAPDVE

SEQ ID NO: 93351 - protein, 9 aa, synthetic construct
  source 1..9: note = Seed: VVVGAGDVG (KRAS G13D)
MVVYAPDVF

SEQ ID NO: 93352 - protein, 9 aa, synthetic construct
  source 1..9: note = Seed: VVVGAGDVG (KRAS G13D)
MVVYAPDVG

SEQ ID NO: 93353 - protein, 9 aa, synthetic construct
  source 1..9: note = Seed: VVVGAGDVG (KRAS G13D)
MVVYAPDVH

SEQ ID NO: 93354 - protein, 9 aa, synthetic construct
  source 1..9: note = Seed: VVVGAGDVG (KRAS G13D)
MVVYAPDVI

SEQ ID NO: 93355 - protein, 9 aa, synthetic construct
  source 1..9: note = Seed: VVVGAGDVG (KRAS G13D)
MVVYAPDVL

SEQ ID NO: 93356 - protein, 9 aa, synthetic construct
  source 1..9: note = Seed: VVVGAGDVG (KRAS G13D)
MVVYAPDVM

SEQ ID NO: 93357 - protein, 9 aa, synthetic construct
  source 1..9: note = Seed: VVVGAGDVG (KRAS G13D)
MVVYAPDVN

SEQ ID NO: 93358 - protein, 9 aa, synthetic construct
  source 1..9: note = Seed: VVVGAGDVG (KRAS G13D)
MVVYAPDVQ

SEQ ID NO: 93359 - protein, 9 aa, synthetic construct
  source 1..9: note = Seed: VVVGAGDVG (KRAS G13D)
MVVYAPDVS

SEQ ID NO: 93360 - protein, 9 aa, synthetic construct
  source 1..9: note = Seed: VVVGAGDVG (KRAS G13D)
MVVYAPDVT

SEQ ID NO: 93361 - protein, 9 aa, synthetic construct
  source 1..9: note = Seed: VVVGAGDVG (KRAS G13D)
MVVYAPDVV

SEQ ID NO: 93362 - protein, 9 aa, synthetic construct
  source 1..9: note = Seed: VVVGAGDVG (KRAS G13D)
MVVYAPDVW

SEQ ID NO: 93363 - protein, 9 aa, synthetic construct
  source 1..9: note = Seed: VVVGAGDVG (KRAS G13D)
MVVYAPDVY

SEQ ID NO: 93364 - protein, 9 aa, synthetic construct
  source 1..9: note = Seed: VVVGAGDVG (KRAS G13D)
MVVYAQDVA

SEQ ID NO: 93365 - protein, 9 aa, synthetic construct
  source 1..9: note = Seed: VVVGAGDVG (KRAS G13D)
MVVYAQDVI

SEQ ID NO: 93366 - protein, 9 aa, synthetic construct
  source 1..9: note = Seed: VVVGAGDVG (KRAS G13D)
MVVYAQDVL

SEQ ID NO: 93367 - protein, 9 aa, synthetic construct
  source 1..9: note = Seed: VVVGAGDVG (KRAS G13D)
MVVYAQDVM

SEQ ID NO: 93368 - protein, 9 aa, synthetic construct
  source 1..9: note = Seed: VVVGAGDVG (KRAS G13D)
MVVYAQDVQ

SEQ ID NO: 93369 - protein, 9 aa, synthetic construct
  source 1..9: note = Seed: VVVGAGDVG (KRAS G13D)
MVVYAQDVS

SEQ ID NO: 93370 - protein, 9 aa, synthetic construct
  source 1..9: note = Seed: VVVGAGDVG (KRAS G13D)
MVVYAQDVV

SEQ ID NO: 93371 - protein, 9 aa, synthetic construct
  source 1..9: note = Seed: VVVGAGDVG (KRAS G13D)
MVVYAQDVY

SEQ ID NO: 93372 - protein, 9 aa, synthetic construct
  source 1..9: note = Seed: VVVGAGDVG (KRAS G13D)
MVVYARDVA

SEQ ID NO: 93373 - protein, 9 aa, synthetic construct
  source 1..9: note = Seed: VVVGAGDVG (KRAS G13D)
MVVYARDVM

SEQ ID NO: 93374 - protein, 9 aa, synthetic construct
  source 1..9: note = Seed: VVVGAGDVG (KRAS G13D)
MVVYARDVV

SEQ ID NO: 93375 - protein, 9 aa, synthetic construct
  source 1..9: note = Seed: VVVGAGDVG (KRAS G13D)
MVVYARDVY

SEQ ID NO: 93376 - protein, 9 aa, synthetic construct
  source 1..9: note = Seed: VVVGAGDVG (KRAS G13D)
MVVYASDVA

SEQ ID NO: 93377 - protein, 9 aa, synthetic construct
  source 1..9: note = Seed: VVVGAGDVG (KRAS G13D)
MVVYASDVC

SEQ ID NO: 93378 - protein, 9 aa, synthetic construct
  source 1..9: note = Seed: VVVGAGDVG (KRAS G13D)
MVVYASDVE

SEQ ID NO: 93379 - protein, 9 aa, synthetic construct
  source 1..9: note = Seed: VVVGAGDVG (KRAS G13D)
MVVYASDVF

SEQ ID NO: 93380 - protein, 9 aa, synthetic construct
  source 1..9: note = Seed: VVVGAGDVG (KRAS G13D)
MVVYASDVG

SEQ ID NO: 93381 - protein, 9 aa, synthetic construct
  source 1..9: note = Seed: VVVGAGDVG (KRAS G13D)
MVVYASDVI

SEQ ID NO: 93382 - protein, 9 aa, synthetic construct
  source 1..9: note = Seed: VVVGAGDVG (KRAS G13D)
MVVYASDVL

SEQ ID NO: 93383 - protein, 9 aa, synthetic construct
  source 1..9: note = Seed: VVVGAGDVG (KRAS G13D)
MVVYASDVM

SEQ ID NO: 93384 - protein, 9 aa, synthetic construct
  source 1..9: note = Seed: VVVGAGDVG (KRAS G13D)
MVVYASDVN

SEQ ID NO: 93385 - protein, 9 aa, synthetic construct
  source 1..9: note = Seed: VVVGAGDVG (KRAS G13D)
MVVYASDVQ

SEQ ID NO: 93386 - protein, 9 aa, synthetic construct
  source 1..9: note = Seed: VVVGAGDVG (KRAS G13D)
MVVYASDVR

SEQ ID NO: 93387 - protein, 9 aa, synthetic construct
  source 1..9: note = Seed: VVVGAGDVG (KRAS G13D)
MVVYASDVS

SEQ ID NO: 93388 - protein, 9 aa, synthetic construct
  source 1..9: note = Seed: VVVGAGDVG (KRAS G13D)
MVVYASDVT

SEQ ID NO: 93389 - protein, 9 aa, synthetic construct
  source 1..9: note = Seed: VVVGAGDVG (KRAS G13D)
MVVYASDVV

SEQ ID NO: 93390 - protein, 9 aa, synthetic construct
  source 1..9: note = Seed: VVVGAGDVG (KRAS G13D)
MVVYASDVW

SEQ ID NO: 93391 - protein, 9 aa, synthetic construct
  source 1..9: note = Seed: VVVGAGDVG (KRAS G13D)
MVVYASDVY

SEQ ID NO: 93392 - protein, 9 aa, synthetic construct
  source 1..9: note = Seed: VVVGAGDVG (KRAS G13D)
MVVYATDVA

SEQ ID NO: 93393 - protein, 9 aa, synthetic construct
  source 1..9: note = Seed: VVVGAGDVG (KRAS G13D)
MVVYATDVF

SEQ ID NO: 93394 - protein, 9 aa, synthetic construct
  source 1..9: note = Seed: VVVGAGDVG (KRAS G13D)
MVVYATDVG

SEQ ID NO: 93395 - protein, 9 aa, synthetic construct
  source 1..9: note = Seed: VVVGAGDVG (KRAS G13D)
MVVYATDVI

SEQ ID NO: 93396 - protein, 9 aa, synthetic construct
  source 1..9: note = Seed: VVVGAGDVG (KRAS G13D)
MVVYATDVL

SEQ ID NO: 93397 - protein, 9 aa, synthetic construct
  source 1..9: note = Seed: VVVGAGDVG (KRAS G13D)
MVVYATDVM

SEQ ID NO: 93398 - protein, 9 aa, synthetic construct
  source 1..9: note = Seed: VVVGAGDVG (KRAS G13D)
MVVYATDVQ

SEQ ID NO: 93399 - protein, 9 aa, synthetic construct
  source 1..9: note = Seed: VVVGAGDVG (KRAS G13D)
MVVYATDVS

SEQ ID NO: 93400 - protein, 9 aa, synthetic construct
  source 1..9: note = Seed: VVVGAGDVG (KRAS G13D)
MVVYATDVT

SEQ ID NO: 93401 - protein, 9 aa, synthetic construct
  source 1..9: note = Seed: VVVGAGDVG (KRAS G13D)
MVVYATDVV

SEQ ID NO: 93402 - protein, 9 aa, synthetic construct
  source 1..9: note = Seed: VVVGAGDVG (KRAS G13D)
MVVYATDVY

SEQ ID NO: 93403 - protein, 9 aa, synthetic construct
  source 1..9: note = Seed: VVVGAGDVG (KRAS G13D)
MVVYAVDVA

SEQ ID NO: 93404 - protein, 9 aa, synthetic construct
  source 1..9: note = Seed: VVVGAGDVG (KRAS G13D)
MVVYAVDVD

SEQ ID NO: 93405 - protein, 9 aa, synthetic construct
  source 1..9: note = Seed: VVVGAGDVG (KRAS G13D)
MVVYAVDVE

SEQ ID NO: 93406 - protein, 9 aa, synthetic construct
  source 1..9: note = Seed: VVVGAGDVG (KRAS G13D)
MVVYAVDVF

SEQ ID NO: 93407 - protein, 9 aa, synthetic construct
  source 1..9: note = Seed: VVVGAGDVG (KRAS G13D)
MVVYAVDVG

SEQ ID NO: 93408 - protein, 9 aa, synthetic construct
  source 1..9: note = Seed: VVVGAGDVG (KRAS G13D)
MVVYAVDVH

SEQ ID NO: 93409 - protein, 9 aa, synthetic construct
  source 1..9: note = Seed: VVVGAGDVG (KRAS G13D)
MVVYAVDVI

SEQ ID NO: 93410 - protein, 9 aa, synthetic construct
  source 1..9: note = Seed: VVVGAGDVG (KRAS G13D)
MVVYAVDVL

SEQ ID NO: 93411 - protein, 9 aa, synthetic construct
  source 1..9: note = Seed: VVVGAGDVG (KRAS G13D)
MVVYAVDVM

SEQ ID NO: 93412 - protein, 9 aa, synthetic construct
  source 1..9: note = Seed: VVVGAGDVG (KRAS G13D)
MVVYAVDVN

SEQ ID NO: 93413 - protein, 9 aa, synthetic construct
  source 1..9: note = Seed: VVVGAGDVG (KRAS G13D)
MVVYAVDVQ

SEQ ID NO: 93414 - protein, 9 aa, synthetic construct
  source 1..9: note = Seed: VVVGAGDVG (KRAS G13D)
MVVYAVDVR

SEQ ID NO: 93415 - protein, 9 aa, synthetic construct
  source 1..9: note = Seed: VVVGAGDVG (KRAS G13D)
MVVYAVDVS

SEQ ID NO: 93416 - protein, 9 aa, synthetic construct
  source 1..9: note = Seed: VVVGAGDVG (KRAS G13D)
MVVYAVDVT

SEQ ID NO: 93417 - protein, 9 aa, synthetic construct
  source 1..9: note = Seed: VVVGAGDVG (KRAS G13D)
MVVYAVDVV

SEQ ID NO: 93418 - protein, 9 aa, synthetic construct
  source 1..9: note = Seed: VVVGAGDVG (KRAS G13D)
MVVYAVDVY

SEQ ID NO: 93419 - protein, 9 aa, synthetic construct
  source 1..9: note = Seed: VVVGAGDVG (KRAS G13D)
NVVFAADVA

SEQ ID NO: 93420 - protein, 9 aa, synthetic construct
  source 1..9: note = Seed: VVVGAGDVG (KRAS G13D)
NVVFAADVE

SEQ ID NO: 93421 - protein, 9 aa, synthetic construct
  source 1..9: note = Seed: VVVGAGDVG (KRAS G13D)
NVVFAADVF

SEQ ID NO: 93422 - protein, 9 aa, synthetic construct
  source 1..9: note = Seed: VVVGAGDVG (KRAS G13D)
NVVFAADVI

SEQ ID NO: 93423 - protein, 9 aa, synthetic construct
  source 1..9: note = Seed: VVVGAGDVG (KRAS G13D)
NVVFAADVL

SEQ ID NO: 93424 - protein, 9 aa, synthetic construct
  source 1..9: note = Seed: VVVGAGDVG (KRAS G13D)
NVVFAADVM

SEQ ID NO: 93425 - protein, 9 aa, synthetic construct
  source 1..9: note = Seed: VVVGAGDVG (KRAS G13D)
NVVFAADVS

SEQ ID NO: 93426 - protein, 9 aa, synthetic construct
  source 1..9: note = Seed: VVVGAGDVG (KRAS G13D)
NVVFAADVT

SEQ ID NO: 93427 - protein, 9 aa, synthetic construct
  source 1..9: note = Seed: VVVGAGDVG (KRAS G13D)
NVVFAADVV

SEQ ID NO: 93428 - protein, 9 aa, synthetic construct
  source 1..9: note = Seed: VVVGAGDVG (KRAS G13D)
NVVFADDVA

SEQ ID NO: 93429 - protein, 9 aa, synthetic construct
  source 1..9: note = Seed: VVVGAGDVG (KRAS G13D)
NVVFADDVF

SEQ ID NO: 93430 - protein, 9 aa, synthetic construct
  source 1..9: note = Seed: VVVGAGDVG (KRAS G13D)
NVVFADDVI

SEQ ID NO: 93431 - protein, 9 aa, synthetic construct
  source 1..9: note = Seed: VVVGAGDVG (KRAS G13D)
NVVFADDVL

SEQ ID NO: 93432 - protein, 9 aa, synthetic construct
  source 1..9: note = Seed: VVVGAGDVG (KRAS G13D)
NVVFADDVM

SEQ ID NO: 93433 - protein, 9 aa, synthetic construct
  source 1..9: note = Seed: VVVGAGDVG (KRAS G13D)
NVVFADDVV

SEQ ID NO: 93434 - protein, 9 aa, synthetic construct
  source 1..9: note = Seed: VVVGAGDVG (KRAS G13D)
NVVFAIDVA

SEQ ID NO: 93435 - protein, 9 aa, synthetic construct
  source 1..9: note = Seed: VVVGAGDVG (KRAS G13D)
NVVFAIDVE

SEQ ID NO: 93436 - protein, 9 aa, synthetic construct
  source 1..9: note = Seed: VVVGAGDVG (KRAS G13D)
NVVFAIDVI

SEQ ID NO: 93437 - protein, 9 aa, synthetic construct
  source 1..9: note = Seed: VVVGAGDVG (KRAS G13D)
NVVFAIDVM

SEQ ID NO: 93438 - protein, 9 aa, synthetic construct
  source 1..9: note = Seed: VVVGAGDVG (KRAS G13D)
NVVFAIDVQ

SEQ ID NO: 93439 - protein, 9 aa, synthetic construct
  source 1..9: note = Seed: VVVGAGDVG (KRAS G13D)
NVVFAIDVS

SEQ ID NO: 93440 - protein, 9 aa, synthetic construct
  source 1..9: note = Seed: VVVGAGDVG (KRAS G13D)
NVVFAIDVT

SEQ ID NO: 93441 - protein, 9 aa, synthetic construct
  source 1..9: note = Seed: VVVGAGDVG (KRAS G13D)
NVVFAIDVV

SEQ ID NO: 93442 - protein, 9 aa, synthetic construct
  source 1..9: note = Seed: VVVGAGDVG (KRAS G13D)
NVVFALDVA

SEQ ID NO: 93443 - protein, 9 aa, synthetic construct
  source 1..9: note = Seed: VVVGAGDVG (KRAS G13D)
NVVFALDVI

SEQ ID NO: 93444 - protein, 9 aa, synthetic construct
  source 1..9: note = Seed: VVVGAGDVG (KRAS G13D)
NVVFALDVM

SEQ ID NO: 93445 - protein, 9 aa, synthetic construct
  source 1..9: note = Seed: VVVGAGDVG (KRAS G13D)
NVVFALDVQ

SEQ ID NO: 93446 - protein, 9 aa, synthetic construct
  source 1..9: note = Seed: VVVGAGDVG (KRAS G13D)
NVVFALDVS

SEQ ID NO: 93447 - protein, 9 aa, synthetic construct
  source 1..9: note = Seed: VVVGAGDVG (KRAS G13D)
NVVFALDVV

SEQ ID NO: 93448 - protein, 9 aa, synthetic construct
  source 1..9: note = Seed: VVVGAGDVG (KRAS G13D)
NVVFALDVY

SEQ ID NO: 93449 - protein, 9 aa, synthetic construct
  source 1..9: note = Seed: VVVGAGDVG (KRAS G13D)
NVVFAMDVA

SEQ ID NO: 93450 - protein, 9 aa, synthetic construct
  source 1..9: note = Seed: VVVGAGDVG (KRAS G13D)
NVVFAMDVM

SEQ ID NO: 93451 - protein, 9 aa, synthetic construct
  source 1..9: note = Seed: VVVGAGDVG (KRAS G13D)
NVVFAMDVS

SEQ ID NO: 93452 - protein, 9 aa, synthetic construct
  source 1..9: note = Seed: VVVGAGDVG (KRAS G13D)
NVVFANDVA

SEQ ID NO: 93453 - protein, 9 aa, synthetic construct
  source 1..9: note = Seed: VVVGAGDVG (KRAS G13D)
NVVFANDVC

SEQ ID NO: 93454 - protein, 9 aa, synthetic construct
  source 1..9: note = Seed: VVVGAGDVG (KRAS G13D)
NVVFANDVE

SEQ ID NO: 93455 - protein, 9 aa, synthetic construct
  source 1..9: note = Seed: VVVGAGDVG (KRAS G13D)
NVVFANDVI

SEQ ID NO: 93456 - protein, 9 aa, synthetic construct
  source 1..9: note = Seed: VVVGAGDVG (KRAS G13D)
NVVFANDVL

SEQ ID NO: 93457 - protein, 9 aa, synthetic construct
  source 1..9: note = Seed: VVVGAGDVG (KRAS G13D)
NVVFANDVM

SEQ ID NO: 93458 - protein, 9 aa, synthetic construct
  source 1..9: note = Seed: VVVGAGDVG (KRAS G13D)
NVVFANDVQ

SEQ ID NO: 93459 - protein, 9 aa, synthetic construct
  source 1..9: note = Seed: VVVGAGDVG (KRAS G13D)
NVVFANDVS

SEQ ID NO: 93460 - protein, 9 aa, synthetic construct
  source 1..9: note = Seed: VVVGAGDVG (KRAS G13D)
NVVFANDVT

SEQ ID NO: 93461 - protein, 9 aa, synthetic construct
  source 1..9: note = Seed: VVVGAGDVG (KRAS G13D)
NVVFANDVV

SEQ ID NO: 93462 - protein, 9 aa, synthetic construct
  source 1..9: note = Seed: VVVGAGDVG (KRAS G13D)
NVVFAPDVA

SEQ ID NO: 93463 - protein, 9 aa, synthetic construct
  source 1..9: note = Seed: VVVGAGDVG (KRAS G13D)
NVVFAPDVF

SEQ ID NO: 93464 - protein, 9 aa, synthetic construct
  source 1..9: note = Seed: VVVGAGDVG (KRAS G13D)
NVVFAPDVI

SEQ ID NO: 93465 - protein, 9 aa, synthetic construct
  source 1..9: note = Seed: VVVGAGDVG (KRAS G13D)
NVVFAPDVL

SEQ ID NO: 93466 - protein, 9 aa, synthetic construct
  source 1..9: note = Seed: VVVGAGDVG (KRAS G13D)
NVVFAPDVM

SEQ ID NO: 93467 - protein, 9 aa, synthetic construct
  source 1..9: note = Seed: VVVGAGDVG (KRAS G13D)
NVVFAPDVV

SEQ ID NO: 93468 - protein, 9 aa, synthetic construct
  source 1..9: note = Seed: VVVGAGDVG (KRAS G13D)
NVVFASDVA

SEQ ID NO: 93469 - protein, 9 aa, synthetic construct
  source 1..9: note = Seed: VVVGAGDVG (KRAS G13D)
NVVFASDVF

SEQ ID NO: 93470 - protein, 9 aa, synthetic construct
  source 1..9: note = Seed: VVVGAGDVG (KRAS G13D)
NVVFASDVI

SEQ ID NO: 93471 - protein, 9 aa, synthetic construct
  source 1..9: note = Seed: VVVGAGDVG (KRAS G13D)
NVVFASDVL

SEQ ID NO: 93472 - protein, 9 aa, synthetic construct
  source 1..9: note = Seed: VVVGAGDVG (KRAS G13D)
NVVFASDVM

SEQ ID NO: 93473 - protein, 9 aa, synthetic construct
  source 1..9: note = Seed: VVVGAGDVG (KRAS G13D)
NVVFASDVV

SEQ ID NO: 93474 - protein, 9 aa, synthetic construct
  source 1..9: note = Seed: VVVGAGDVG (KRAS G13D)
NVVFATDVA

SEQ ID NO: 93475 - protein, 9 aa, synthetic construct
  source 1..9: note = Seed: VVVGAGDVG (KRAS G13D)
NVVFATDVF

SEQ ID NO: 93476 - protein, 9 aa, synthetic construct
  source 1..9: note = Seed: VVVGAGDVG (KRAS G13D)
NVVFATDVI

SEQ ID NO: 93477 - protein, 9 aa, synthetic construct
  source 1..9: note = Seed: VVVGAGDVG (KRAS G13D)
NVVFATDVL

SEQ ID NO: 93478 - protein, 9 aa, synthetic construct
  source 1..9: note = Seed: VVVGAGDVG (KRAS G13D)
NVVFATDVM

SEQ ID NO: 93479 - protein, 9 aa, synthetic construct
  source 1..9: note = Seed: VVVGAGDVG (KRAS G13D)
NVVFATDVV

SEQ ID NO: 93480 - protein, 9 aa, synthetic construct
  source 1..9: note = Seed: VVVGAGDVG (KRAS G13D)
NVVFAVDVA

SEQ ID NO: 93481 - protein, 9 aa, synthetic construct
  source 1..9: note = Seed: VVVGAGDVG (KRAS G13D)
NVVFAVDVF

SEQ ID NO: 93482 - protein, 9 aa, synthetic construct
  source 1..9: note = Seed: VVVGAGDVG (KRAS G13D)
NVVFAVDVI

SEQ ID NO: 93483 - protein, 9 aa, synthetic construct
  source 1..9: note = Seed: VVVGAGDVG (KRAS G13D)
NVVFAVDVL

SEQ ID NO: 93484 - protein, 9 aa, synthetic construct
  source 1..9: note = Seed: VVVGAGDVG (KRAS G13D)
NVVFAVDVM

SEQ ID NO: 93485 - protein, 9 aa, synthetic construct
  source 1..9: note = Seed: VVVGAGDVG (KRAS G13D)
NVVFAVDVQ

SEQ ID NO: 93486 - protein, 9 aa, synthetic construct
  source 1..9: note = Seed: VVVGAGDVG (KRAS G13D)
NVVFAVDVS

SEQ ID NO: 93487 - protein, 9 aa, synthetic construct
  source 1..9: note = Seed: VVVGAGDVG (KRAS G13D)
NVVFAVDVV

SEQ ID NO: 93488 - protein, 9 aa, synthetic construct
  source 1..9: note = Seed: VVVGAGDVG (KRAS G13D)
NVVIAADVA

SEQ ID NO: 93489 - protein, 9 aa, synthetic construct
  source 1..9: note = Seed: VVVGAGDVG (KRAS G13D)
NVVIAADVV

SEQ ID NO: 93490 - protein, 9 aa, synthetic construct
  source 1..9: note = Seed: VVVGAGDVG (KRAS G13D)
NVVIANDVA

SEQ ID NO: 93491 - protein, 9 aa, synthetic construct
  source 1..9: note = Seed: VVVGAGDVG (KRAS G13D)
NVVIANDVI

SEQ ID NO: 93492 - protein, 9 aa, synthetic construct
  source 1..9: note = Seed: VVVGAGDVG (KRAS G13D)
NVVIANDVL

SEQ ID NO: 93493 - protein, 9 aa, synthetic construct
  source 1..9: note = Seed: VVVGAGDVG (KRAS G13D)
NVVIANDVM

SEQ ID NO: 93494 - protein, 9 aa, synthetic construct
  source 1..9: note = Seed: VVVGAGDVG (KRAS G13D)
NVVIANDVV

SEQ ID NO: 93495 - protein, 9 aa, synthetic construct
  source 1..9: note = Seed: VVVGAGDVG (KRAS G13D)
NVVLALDVA

SEQ ID NO: 93496 - protein, 9 aa, synthetic construct
  source 1..9: note = Seed: VVVGAGDVG (KRAS G13D)
NVVLANDVA

SEQ ID NO: 93497 - protein, 9 aa, synthetic construct
  source 1..9: note = Seed: VVVGAGDVG (KRAS G13D)
NVVLANDVI

SEQ ID NO: 93498 - protein, 9 aa, synthetic construct
  source 1..9: note = Seed: VVVGAGDVG (KRAS G13D)
NVVLANDVM

SEQ ID NO: 93499 - protein, 9 aa, synthetic construct
  source 1..9: note = Seed: VVVGAGDVG (KRAS G13D)
NVVLANDVV

SEQ ID NO: 93500 - protein, 9 aa, synthetic construct
  source 1..9: note = Seed: VVVGAGDVG (KRAS G13D)
NVVLASDVI

SEQ ID NO: 93501 - protein, 9 aa, synthetic construct
  source 1..9: note = Seed: VVVGAGDVG (KRAS G13D)
NVVLASDVM

SEQ ID NO: 93502 - protein, 9 aa, synthetic construct
  source 1..9: note = Seed: VVVGAGDVG (KRAS G13D)
NVVLASDVV

SEQ ID NO: 93503 - protein, 9 aa, synthetic construct
  source 1..9: note = Seed: VVVGAGDVG (KRAS G13D)
NVVMAADVS

SEQ ID NO: 93504 - protein, 9 aa, synthetic construct
  source 1..9: note = Seed: VVVGAGDVG (KRAS G13D)
NVVMAADVV

SEQ ID NO: 93505 - protein, 9 aa, synthetic construct
  source 1..9: note = Seed: VVVGAGDVG (KRAS G13D)
NVVMADDVI

SEQ ID NO: 93506 - protein, 9 aa, synthetic construct
  source 1..9: note = Seed: VVVGAGDVG (KRAS G13D)
NVVMADDVL

SEQ ID NO: 93507 - protein, 9 aa, synthetic construct
  source 1..9: note = Seed: VVVGAGDVG (KRAS G13D)
NVVMAIDVA

SEQ ID NO: 93508 - protein, 9 aa, synthetic construct
  source 1..9: note = Seed: VVVGAGDVG (KRAS G13D)
NVVMAIDVS

SEQ ID NO: 93509 - protein, 9 aa, synthetic construct
  source 1..9: note = Seed: VVVGAGDVG (KRAS G13D)
NVVMALDVA

SEQ ID NO: 93510 - protein, 9 aa, synthetic construct
  source 1..9: note = Seed: VVVGAGDVG (KRAS G13D)
NVVMALDVS

SEQ ID NO: 93511 - protein, 9 aa, synthetic construct
  source 1..9: note = Seed: VVVGAGDVG (KRAS G13D)
NVVMANDVA

SEQ ID NO: 93512 - protein, 9 aa, synthetic construct
  source 1..9: note = Seed: VVVGAGDVG (KRAS G13D)
NVVMANDVI

SEQ ID NO: 93513 - protein, 9 aa, synthetic construct
  source 1..9: note = Seed: VVVGAGDVG (KRAS G13D)
NVVMANDVL

SEQ ID NO: 93514 - protein, 9 aa, synthetic construct
  source 1..9: note = Seed: VVVGAGDVG (KRAS G13D)
NVVMANDVM

SEQ ID NO: 93515 - protein, 9 aa, synthetic construct
  source 1..9: note = Seed: VVVGAGDVG (KRAS G13D)
NVVMANDVS

SEQ ID NO: 93516 - protein, 9 aa, synthetic construct
  source 1..9: note = Seed: VVVGAGDVG (KRAS G13D)
NVVMANDVV

SEQ ID NO: 93517 - protein, 9 aa, synthetic construct
  source 1..9: note = Seed: VVVGAGDVG (KRAS G13D)
NVVMASDVA

SEQ ID NO: 93518 - protein, 9 aa, synthetic construct
  source 1..9: note = Seed: VVVGAGDVG (KRAS G13D)
NVVMASDVI

SEQ ID NO: 93519 - protein, 9 aa, synthetic construct
  source 1..9: note = Seed: VVVGAGDVG (KRAS G13D)
NVVMASDVM

SEQ ID NO: 93520 - protein, 9 aa, synthetic construct
  source 1..9: note = Seed: VVVGAGDVG (KRAS G13D)
NVVMASDVV

SEQ ID NO: 93521 - protein, 9 aa, synthetic construct
  source 1..9: note = Seed: VVVGAGDVG (KRAS G13D)
NVVMATDVI

SEQ ID NO: 93522 - protein, 9 aa, synthetic construct
  source 1..9: note = Seed: VVVGAGDVG (KRAS G13D)
NVVMATDVM

SEQ ID NO: 93523 - protein, 9 aa, synthetic construct
  source 1..9: note = Seed: VVVGAGDVG (KRAS G13D)
NVVMATDVV

SEQ ID NO: 93524 - protein, 9 aa, synthetic construct
  source 1..9: note = Seed: VVVGAGDVG (KRAS G13D)
NVVMAVDVA

SEQ ID NO: 93525 - protein, 9 aa, synthetic construct
  source 1..9: note = Seed: VVVGAGDVG (KRAS G13D)
NVVMAVDVS

SEQ ID NO: 93526 - protein, 9 aa, synthetic construct
  source 1..9: note = Seed: VVVGAGDVG (KRAS G13D)
NVVWAADVA

SEQ ID NO: 93527 - protein, 9 aa, synthetic construct
  source 1..9: note = Seed: VVVGAGDVG (KRAS G13D)
NVVWAADVD

SEQ ID NO: 93528 - protein, 9 aa, synthetic construct
  source 1..9: note = Seed: VVVGAGDVG (KRAS G13D)
NVVWAADVF

SEQ ID NO: 93529 - protein, 9 aa, synthetic construct
  source 1..9: note = Seed: VVVGAGDVG (KRAS G13D)
NVVWAADVI

SEQ ID NO: 93530 - protein, 9 aa, synthetic construct
  source 1..9: note = Seed: VVVGAGDVG (KRAS G13D)
NVVWAADVL

SEQ ID NO: 93531 - protein, 9 aa, synthetic construct
  source 1..9: note = Seed: VVVGAGDVG (KRAS G13D)
NVVWAADVM

SEQ ID NO: 93532 - protein, 9 aa, synthetic construct
  source 1..9: note = Seed: VVVGAGDVG (KRAS G13D)
NVVWAADVS

SEQ ID NO: 93533 - protein, 9 aa, synthetic construct
  source 1..9: note = Seed: VVVGAGDVG (KRAS G13D)
NVVWAADVT

SEQ ID NO: 93534 - protein, 9 aa, synthetic construct
  source 1..9: note = Seed: VVVGAGDVG (KRAS G13D)
NVVWAADVV

SEQ ID NO: 93535 - protein, 9 aa, synthetic construct
  source 1..9: note = Seed: VVVGAGDVG (KRAS G13D)
NVVWADDVA

SEQ ID NO: 93536 - protein, 9 aa, synthetic construct
  source 1..9: note = Seed: VVVGAGDVG (KRAS G13D)
NVVWADDVF

SEQ ID NO: 93537 - protein, 9 aa, synthetic construct
  source 1..9: note = Seed: VVVGAGDVG (KRAS G13D)
NVVWADDVI

SEQ ID NO: 93538 - protein, 9 aa, synthetic construct
  source 1..9: note = Seed: VVVGAGDVG (KRAS G13D)
NVVWADDVL

SEQ ID NO: 93539 - protein, 9 aa, synthetic construct
  source 1..9: note = Seed: VVVGAGDVG (KRAS G13D)
NVVWADDVM

SEQ ID NO: 93540 - protein, 9 aa, synthetic construct
  source 1..9: note = Seed: VVVGAGDVG (KRAS G13D)
NVVWADDVV

SEQ ID NO: 93541 - protein, 9 aa, synthetic construct
  source 1..9: note = Seed: VVVGAGDVG (KRAS G13D)
NVVWADDVY

SEQ ID NO: 93542 - protein, 9 aa, synthetic construct
  source 1..9: note = Seed: VVVGAGDVG (KRAS G13D)
NVVWAEDVI

SEQ ID NO: 93543 - protein, 9 aa, synthetic construct
  source 1..9: note = Seed: VVVGAGDVG (KRAS G13D)
NVVWAEDVL

SEQ ID NO: 93544 - protein, 9 aa, synthetic construct
  source 1..9: note = Seed: VVVGAGDVG (KRAS G13D)
NVVWAEDVM

SEQ ID NO: 93545 - protein, 9 aa, synthetic construct
  source 1..9: note = Seed: VVVGAGDVG (KRAS G13D)
NVVWAEDVV

SEQ ID NO: 93546 - protein, 9 aa, synthetic construct
  source 1..9: note = Seed: VVVGAGDVG (KRAS G13D)
NVVWAIDVA

SEQ ID NO: 93547 - protein, 9 aa, synthetic construct
  source 1..9: note = Seed: VVVGAGDVG (KRAS G13D)
NVVWAIDVE

SEQ ID NO: 93548 - protein, 9 aa, synthetic construct
  source 1..9: note = Seed: VVVGAGDVG (KRAS G13D)
NVVWAIDVF

SEQ ID NO: 93549 - protein, 9 aa, synthetic construct
  source 1..9: note = Seed: VVVGAGDVG (KRAS G13D)
NVVWAIDVI

SEQ ID NO: 93550 - protein, 9 aa, synthetic construct
  source 1..9: note = Seed: VVVGAGDVG (KRAS G13D)
NVVWAIDVL

SEQ ID NO: 93551 - protein, 9 aa, synthetic construct
  source 1..9: note = Seed: VVVGAGDVG (KRAS G13D)
NVVWAIDVM

SEQ ID NO: 93552 - protein, 9 aa, synthetic construct
  source 1..9: note = Seed: VVVGAGDVG (KRAS G13D)
NVVWAIDVQ

SEQ ID NO: 93553 - protein, 9 aa, synthetic construct
  source 1..9: note = Seed: VVVGAGDVG (KRAS G13D)
NVVWAIDVS

SEQ ID NO: 93554 - protein, 9 aa, synthetic construct
  source 1..9: note = Seed: VVVGAGDVG (KRAS G13D)
NVVWAIDVT

SEQ ID NO: 93555 - protein, 9 aa, synthetic construct
  source 1..9: note = Seed: VVVGAGDVG (KRAS G13D)
NVVWAIDVV

SEQ ID NO: 93556 - protein, 9 aa, synthetic construct
  source 1..9: note = Seed: VVVGAGDVG (KRAS G13D)
NVVWALDVA

SEQ ID NO: 93557 - protein, 9 aa, synthetic construct
  source 1..9: note = Seed: VVVGAGDVG (KRAS G13D)
NVVWALDVF

SEQ ID NO: 93558 - protein, 9 aa, synthetic construct
  source 1..9: note = Seed: VVVGAGDVG (KRAS G13D)
NVVWALDVI

SEQ ID NO: 93559 - protein, 9 aa, synthetic construct
  source 1..9: note = Seed: VVVGAGDVG (KRAS G13D)
NVVWALDVL

SEQ ID NO: 93560 - protein, 9 aa, synthetic construct
  source 1..9: note = Seed: VVVGAGDVG (KRAS G13D)
NVVWALDVM

SEQ ID NO: 93561 - protein, 9 aa, synthetic construct
  source 1..9: note = Seed: VVVGAGDVG (KRAS G13D)
NVVWALDVQ

SEQ ID NO: 93562 - protein, 9 aa, synthetic construct
  source 1..9: note = Seed: VVVGAGDVG (KRAS G13D)
NVVWALDVS

SEQ ID NO: 93563 - protein, 9 aa, synthetic construct
  source 1..9: note = Seed: VVVGAGDVG (KRAS G13D)
NVVWALDVV

SEQ ID NO: 93564 - protein, 9 aa, synthetic construct
  source 1..9: note = Seed: VVVGAGDVG (KRAS G13D)
NVVWALDVY

SEQ ID NO: 93565 - protein, 9 aa, synthetic construct
  source 1..9: note = Seed: VVVGAGDVG (KRAS G13D)
NVVWAMDVM

SEQ ID NO: 93566 - protein, 9 aa, synthetic construct
  source 1..9: note = Seed: VVVGAGDVG (KRAS G13D)
NVVWAMDVS

SEQ ID NO: 93567 - protein, 9 aa, synthetic construct
  source 1..9: note = Seed: VVVGAGDVG (KRAS G13D)
NVVWAMDVT

SEQ ID NO: 93568 - protein, 9 aa, synthetic construct
  source 1..9: note = Seed: VVVGAGDVG (KRAS G13D)
NVVWAMDVV

SEQ ID NO: 93569 - protein, 9 aa, synthetic construct
  source 1..9: note = Seed: VVVGAGDVG (KRAS G13D)
NVVWANDVA

SEQ ID NO: 93570 - protein, 9 aa, synthetic construct
  source 1..9: note = Seed: VVVGAGDVG (KRAS G13D)
NVVWANDVC

SEQ ID NO: 93571 - protein, 9 aa, synthetic construct
  source 1..9: note = Seed: VVVGAGDVG (KRAS G13D)
NVVWANDVD

SEQ ID NO: 93572 - protein, 9 aa, synthetic construct
  source 1..9: note = Seed: VVVGAGDVG (KRAS G13D)
NVVWANDVE

SEQ ID NO: 93573 - protein, 9 aa, synthetic construct
  source 1..9: note = Seed: VVVGAGDVG (KRAS G13D)
NVVWANDVF

SEQ ID NO: 93574 - protein, 9 aa, synthetic construct
  source 1..9: note = Seed: VVVGAGDVG (KRAS G13D)
NVVWANDVG

SEQ ID NO: 93575 - protein, 9 aa, synthetic construct
  source 1..9: note = Seed: VVVGAGDVG (KRAS G13D)
NVVWANDVI

SEQ ID NO: 93576 - protein, 9 aa, synthetic construct
  source 1..9: note = Seed: VVVGAGDVG (KRAS G13D)
NVVWANDVL

SEQ ID NO: 93577 - protein, 9 aa, synthetic construct
  source 1..9: note = Seed: VVVGAGDVG (KRAS G13D)
NVVWANDVM

SEQ ID NO: 93578 - protein, 9 aa, synthetic construct
  source 1..9: note = Seed: VVVGAGDVG (KRAS G13D)
NVVWANDVN

SEQ ID NO: 93579 - protein, 9 aa, synthetic construct
  source 1..9: note = Seed: VVVGAGDVG (KRAS G13D)
NVVWANDVQ

SEQ ID NO: 93580 - protein, 9 aa, synthetic construct
  source 1..9: note = Seed: VVVGAGDVG (KRAS G13D)
NVVWANDVS

SEQ ID NO: 93581 - protein, 9 aa, synthetic construct
  source 1..9: note = Seed: VVVGAGDVG (KRAS G13D)
NVVWANDVT

SEQ ID NO: 93582 - protein, 9 aa, synthetic construct
  source 1..9: note = Seed: VVVGAGDVG (KRAS G13D)
NVVWANDVV

SEQ ID NO: 93583 - protein, 9 aa, synthetic construct
  source 1..9: note = Seed: VVVGAGDVG (KRAS G13D)
NVVWANDVY

SEQ ID NO: 93584 - protein, 9 aa, synthetic construct
  source 1..9: note = Seed: VVVGAGDVG (KRAS G13D)
NVVWAPDVA

SEQ ID NO: 93585 - protein, 9 aa, synthetic construct
  source 1..9: note = Seed: VVVGAGDVG (KRAS G13D)
NVVWAPDVI

SEQ ID NO: 93586 - protein, 9 aa, synthetic construct
  source 1..9: note = Seed: VVVGAGDVG (KRAS G13D)
NVVWAPDVL

SEQ ID NO: 93587 - protein, 9 aa, synthetic construct
  source 1..9: note = Seed: VVVGAGDVG (KRAS G13D)
NVVWAPDVM

SEQ ID NO: 93588 - protein, 9 aa, synthetic construct
  source 1..9: note = Seed: VVVGAGDVG (KRAS G13D)
NVVWAPDVV

SEQ ID NO: 93589 - protein, 9 aa, synthetic construct
  source 1..9: note = Seed: VVVGAGDVG (KRAS G13D)
NVVWAPDVY

SEQ ID NO: 93590 - protein, 9 aa, synthetic construct
  source 1..9: note = Seed: VVVGAGDVG (KRAS G13D)
NVVWASDVA

SEQ ID NO: 93591 - protein, 9 aa, synthetic construct
  source 1..9: note = Seed: VVVGAGDVG (KRAS G13D)
NVVWASDVF

SEQ ID NO: 93592 - protein, 9 aa, synthetic construct
  source 1..9: note = Seed: VVVGAGDVG (KRAS G13D)
NVVWASDVI

SEQ ID NO: 93593 - protein, 9 aa, synthetic construct
  source 1..9: note = Seed: VVVGAGDVG (KRAS G13D)
NVVWASDVL

SEQ ID NO: 93594 - protein, 9 aa, synthetic construct
  source 1..9: note = Seed: VVVGAGDVG (KRAS G13D)
NVVWASDVM

SEQ ID NO: 93595 - protein, 9 aa, synthetic construct
  source 1..9: note = Seed: VVVGAGDVG (KRAS G13D)
NVVWASDVV

SEQ ID NO: 93596 - protein, 9 aa, synthetic construct
  source 1..9: note = Seed: VVVGAGDVG (KRAS G13D)
NVVWATDVA

SEQ ID NO: 93597 - protein, 9 aa, synthetic construct
  source 1..9: note = Seed: VVVGAGDVG (KRAS G13D)
NVVWATDVF

SEQ ID NO: 93598 - protein, 9 aa, synthetic construct
  source 1..9: note = Seed: VVVGAGDVG (KRAS G13D)
NVVWATDVI

SEQ ID NO: 93599 - protein, 9 aa, synthetic construct
  source 1..9: note = Seed: VVVGAGDVG (KRAS G13D)
NVVWATDVL

SEQ ID NO: 93600 - protein, 9 aa, synthetic construct
  source 1..9: note = Seed: VVVGAGDVG (KRAS G13D)
NVVWATDVM

SEQ ID NO: 93601 - protein, 9 aa, synthetic construct
  source 1..9: note = Seed: VVVGAGDVG (KRAS G13D)
NVVWATDVV

SEQ ID NO: 93602 - protein, 9 aa, synthetic construct
  source 1..9: note = Seed: VVVGAGDVG (KRAS G13D)
NVVWAVDVA

SEQ ID NO: 93603 - protein, 9 aa, synthetic construct
  source 1..9: note = Seed: VVVGAGDVG (KRAS G13D)
NVVWAVDVI

SEQ ID NO: 93604 - protein, 9 aa, synthetic construct
  source 1..9: note = Seed: VVVGAGDVG (KRAS G13D)
NVVWAVDVL

SEQ ID NO: 93605 - protein, 9 aa, synthetic construct
  source 1..9: note = Seed: VVVGAGDVG (KRAS G13D)
NVVWAVDVM

SEQ ID NO: 93606 - protein, 9 aa, synthetic construct
  source 1..9: note = Seed: VVVGAGDVG (KRAS G13D)
NVVWAVDVQ

SEQ ID NO: 93607 - protein, 9 aa, synthetic construct
  source 1..9: note = Seed: VVVGAGDVG (KRAS G13D)
NVVWAVDVS

SEQ ID NO: 93608 - protein, 9 aa, synthetic construct
  source 1..9: note = Seed: VVVGAGDVG (KRAS G13D)
NVVWAVDVV

SEQ ID NO: 93609 - protein, 9 aa, synthetic construct
  source 1..9: note = Seed: VVVGAGDVG (KRAS G13D)
NVVYAADVA

SEQ ID NO: 93610 - protein, 9 aa, synthetic construct
  source 1..9: note = Seed: VVVGAGDVG (KRAS G13D)
NVVYAADVE

SEQ ID NO: 93611 - protein, 9 aa, synthetic construct
  source 1..9: note = Seed: VVVGAGDVG (KRAS G13D)
NVVYAADVI

SEQ ID NO: 93612 - protein, 9 aa, synthetic construct
  source 1..9: note = Seed: VVVGAGDVG (KRAS G13D)
NVVYAADVL

SEQ ID NO: 93613 - protein, 9 aa, synthetic construct
  source 1..9: note = Seed: VVVGAGDVG (KRAS G13D)
NVVYAADVM

SEQ ID NO: 93614 - protein, 9 aa, synthetic construct
  source 1..9: note = Seed: VVVGAGDVG (KRAS G13D)
NVVYAADVS

SEQ ID NO: 93615 - protein, 9 aa, synthetic construct
  source 1..9: note = Seed: VVVGAGDVG (KRAS G13D)
NVVYAADVT

SEQ ID NO: 93616 - protein, 9 aa, synthetic construct
  source 1..9: note = Seed: VVVGAGDVG (KRAS G13D)
NVVYAADVV

SEQ ID NO: 93617 - protein, 9 aa, synthetic construct
  source 1..9: note = Seed: VVVGAGDVG (KRAS G13D)
NVVYADDVA

SEQ ID NO: 93618 - protein, 9 aa, synthetic construct
  source 1..9: note = Seed: VVVGAGDVG (KRAS G13D)
NVVYADDVI

SEQ ID NO: 93619 - protein, 9 aa, synthetic construct
  source 1..9: note = Seed: VVVGAGDVG (KRAS G13D)
NVVYADDVL

SEQ ID NO: 93620 - protein, 9 aa, synthetic construct
  source 1..9: note = Seed: VVVGAGDVG (KRAS G13D)
NVVYADDVM

SEQ ID NO: 93621 - protein, 9 aa, synthetic construct
  source 1..9: note = Seed: VVVGAGDVG (KRAS G13D)
NVVYADDVV

SEQ ID NO: 93622 - protein, 9 aa, synthetic construct
  source 1..9: note = Seed: VVVGAGDVG (KRAS G13D)
NVVYAIDVA

SEQ ID NO: 93623 - protein, 9 aa, synthetic construct
  source 1..9: note = Seed: VVVGAGDVG (KRAS G13D)
NVVYAIDVC

SEQ ID NO: 93624 - protein, 9 aa, synthetic construct
  source 1..9: note = Seed: VVVGAGDVG (KRAS G13D)
NVVYAIDVE

SEQ ID NO: 93625 - protein, 9 aa, synthetic construct
  source 1..9: note = Seed: VVVGAGDVG (KRAS G13D)
NVVYAIDVG

SEQ ID NO: 93626 - protein, 9 aa, synthetic construct
  source 1..9: note = Seed: VVVGAGDVG (KRAS G13D)
NVVYAIDVI

SEQ ID NO: 93627 - protein, 9 aa, synthetic construct
  source 1..9: note = Seed: VVVGAGDVG (KRAS G13D)
NVVYAIDVL

SEQ ID NO: 93628 - protein, 9 aa, synthetic construct
  source 1..9: note = Seed: VVVGAGDVG (KRAS G13D)
NVVYAIDVM

SEQ ID NO: 93629 - protein, 9 aa, synthetic construct
  source 1..9: note = Seed: VVVGAGDVG (KRAS G13D)
NVVYAIDVS

SEQ ID NO: 93630 - protein, 9 aa, synthetic construct
  source 1..9: note = Seed: VVVGAGDVG (KRAS G13D)
NVVYAIDVT

SEQ ID NO: 93631 - protein, 9 aa, synthetic construct
  source 1..9: note = Seed: VVVGAGDVG (KRAS G13D)
NVVYAIDVV

SEQ ID NO: 93632 - protein, 9 aa, synthetic construct
  source 1..9: note = Seed: VVVGAGDVG (KRAS G13D)
NVVYALDVA

SEQ ID NO: 93633 - protein, 9 aa, synthetic construct
  source 1..9: note = Seed: VVVGAGDVG (KRAS G13D)
NVVYALDVE

SEQ ID NO: 93634 - protein, 9 aa, synthetic construct
  source 1..9: note = Seed: VVVGAGDVG (KRAS G13D)
NVVYALDVF

SEQ ID NO: 93635 - protein, 9 aa, synthetic construct
  source 1..9: note = Seed: VVVGAGDVG (KRAS G13D)
NVVYALDVI

SEQ ID NO: 93636 - protein, 9 aa, synthetic construct
  source 1..9: note = Seed: VVVGAGDVG (KRAS G13D)
NVVYALDVL

SEQ ID NO: 93637 - protein, 9 aa, synthetic construct
  source 1..9: note = Seed: VVVGAGDVG (KRAS G13D)
NVVYALDVM

SEQ ID NO: 93638 - protein, 9 aa, synthetic construct
  source 1..9: note = Seed: VVVGAGDVG (KRAS G13D)
NVVYALDVS

SEQ ID NO: 93639 - protein, 9 aa, synthetic construct
  source 1..9: note = Seed: VVVGAGDVG (KRAS G13D)
NVVYALDVV

SEQ ID NO: 93640 - protein, 9 aa, synthetic construct
  source 1..9: note = Seed: VVVGAGDVG (KRAS G13D)
NVVYALDVY

SEQ ID NO: 93641 - protein, 9 aa, synthetic construct
  source 1..9: note = Seed: VVVGAGDVG (KRAS G13D)
NVVYAMDVA

SEQ ID NO: 93642 - protein, 9 aa, synthetic construct
  source 1..9: note = Seed: VVVGAGDVG (KRAS G13D)
NVVYAMDVC

SEQ ID NO: 93643 - protein, 9 aa, synthetic construct
  source 1..9: note = Seed: VVVGAGDVG (KRAS G13D)
NVVYAMDVM

SEQ ID NO: 93644 - protein, 9 aa, synthetic construct
  source 1..9: note = Seed: VVVGAGDVG (KRAS G13D)
NVVYAMDVS

SEQ ID NO: 93645 - protein, 9 aa, synthetic construct
  source 1..9: note = Seed: VVVGAGDVG (KRAS G13D)
NVVYANDVA

SEQ ID NO: 93646 - protein, 9 aa, synthetic construct
  source 1..9: note = Seed: VVVGAGDVG (KRAS G13D)
NVVYANDVI

SEQ ID NO: 93647 - protein, 9 aa, synthetic construct
  source 1..9: note = Seed: VVVGAGDVG (KRAS G13D)
NVVYANDVL

SEQ ID NO: 93648 - protein, 9 aa, synthetic construct
  source 1..9: note = Seed: VVVGAGDVG (KRAS G13D)
NVVYANDVM

SEQ ID NO: 93649 - protein, 9 aa, synthetic construct
  source 1..9: note = Seed: VVVGAGDVG (KRAS G13D)
NVVYANDVQ

SEQ ID NO: 93650 - protein, 9 aa, synthetic construct
  source 1..9: note = Seed: VVVGAGDVG (KRAS G13D)
NVVYANDVS

SEQ ID NO: 93651 - protein, 9 aa, synthetic construct
  source 1..9: note = Seed: VVVGAGDVG (KRAS G13D)
NVVYANDVV

SEQ ID NO: 93652 - protein, 9 aa, synthetic construct
  source 1..9: note = Seed: VVVGAGDVG (KRAS G13D)
NVVYAPDVL

SEQ ID NO: 93653 - protein, 9 aa, synthetic construct
  source 1..9: note = Seed: VVVGAGDVG (KRAS G13D)
NVVYASDVA

SEQ ID NO: 93654 - protein, 9 aa, synthetic construct
  source 1..9: note = Seed: VVVGAGDVG (KRAS G13D)
NVVYASDVF

SEQ ID NO: 93655 - protein, 9 aa, synthetic construct
  source 1..9: note = Seed: VVVGAGDVG (KRAS G13D)
NVVYASDVI

SEQ ID NO: 93656 - protein, 9 aa, synthetic construct
  source 1..9: note = Seed: VVVGAGDVG (KRAS G13D)
NVVYASDVL

SEQ ID NO: 93657 - protein, 9 aa, synthetic construct
  source 1..9: note = Seed: VVVGAGDVG (KRAS G13D)
NVVYASDVM

SEQ ID NO: 93658 - protein, 9 aa, synthetic construct
  source 1..9: note = Seed: VVVGAGDVG (KRAS G13D)
NVVYASDVV

SEQ ID NO: 93659 - protein, 9 aa, synthetic construct
  source 1..9: note = Seed: VVVGAGDVG (KRAS G13D)
NVVYATDVA

SEQ ID NO: 93660 - protein, 9 aa, synthetic construct
  source 1..9: note = Seed: VVVGAGDVG (KRAS G13D)
NVVYATDVF

SEQ ID NO: 93661 - protein, 9 aa, synthetic construct
  source 1..9: note = Seed: VVVGAGDVG (KRAS G13D)
NVVYATDVI

SEQ ID NO: 93662 - protein, 9 aa, synthetic construct
  source 1..9: note = Seed: VVVGAGDVG (KRAS G13D)
NVVYATDVL

SEQ ID NO: 93663 - protein, 9 aa, synthetic construct
  source 1..9: note = Seed: VVVGAGDVG (KRAS G13D)
NVVYATDVM

SEQ ID NO: 93664 - protein, 9 aa, synthetic construct
  source 1..9: note = Seed: VVVGAGDVG (KRAS G13D)
NVVYATDVV

SEQ ID NO: 93665 - protein, 9 aa, synthetic construct
  source 1..9: note = Seed: VVVGAGDVG (KRAS G13D)
NVVYAVDVA

SEQ ID NO: 93666 - protein, 9 aa, synthetic construct
  source 1..9: note = Seed: VVVGAGDVG (KRAS G13D)
NVVYAVDVE

SEQ ID NO: 93667 - protein, 9 aa, synthetic construct
  source 1..9: note = Seed: VVVGAGDVG (KRAS G13D)
NVVYAVDVI

SEQ ID NO: 93668 - protein, 9 aa, synthetic construct
  source 1..9: note = Seed: VVVGAGDVG (KRAS G13D)
NVVYAVDVL

SEQ ID NO: 93669 - protein, 9 aa, synthetic construct
  source 1..9: note = Seed: VVVGAGDVG (KRAS G13D)
NVVYAVDVM

SEQ ID NO: 93670 - protein, 9 aa, synthetic construct
  source 1..9: note = Seed: VVVGAGDVG (KRAS G13D)
NVVYAVDVQ

SEQ ID NO: 93671 - protein, 9 aa, synthetic construct
  source 1..9: note = Seed: VVVGAGDVG (KRAS G13D)
NVVYAVDVS

SEQ ID NO: 93672 - protein, 9 aa, synthetic construct
  source 1..9: note = Seed: VVVGAGDVG (KRAS G13D)
NVVYAVDVT

SEQ ID NO: 93673 - protein, 9 aa, synthetic construct
  source 1..9: note = Seed: VVVGAGDVG (KRAS G13D)
NVVYAVDVV

SEQ ID NO: 93674 - protein, 9 aa, synthetic construct
  source 1..9: note = Seed: VVVGAGDVG (KRAS G13D)
NVVYAVDVY

SEQ ID NO: 93675 - protein, 9 aa, synthetic construct
  source 1..9: note = Seed: VVVGAGDVG (KRAS G13D)
QVVAANDVA

SEQ ID NO: 93676 - protein, 9 aa, synthetic construct
  source 1..9: note = Seed: VVVGAGDVG (KRAS G13D)
QVVFAADVA

SEQ ID NO: 93677 - protein, 9 aa, synthetic construct
  source 1..9: note = Seed: VVVGAGDVG (KRAS G13D)
QVVFAADVF

SEQ ID NO: 93678 - protein, 9 aa, synthetic construct
  source 1..9: note = Seed: VVVGAGDVG (KRAS G13D)
QVVFAADVI

SEQ ID NO: 93679 - protein, 9 aa, synthetic construct
  source 1..9: note = Seed: VVVGAGDVG (KRAS G13D)
QVVFAADVL

SEQ ID NO: 93680 - protein, 9 aa, synthetic construct
  source 1..9: note = Seed: VVVGAGDVG (KRAS G13D)
QVVFAADVM

SEQ ID NO: 93681 - protein, 9 aa, synthetic construct
  source 1..9: note = Seed: VVVGAGDVG (KRAS G13D)
QVVFAADVS

SEQ ID NO: 93682 - protein, 9 aa, synthetic construct
  source 1..9: note = Seed: VVVGAGDVG (KRAS G13D)
QVVFAADVV

SEQ ID NO: 93683 - protein, 9 aa, synthetic construct
  source 1..9: note = Seed: VVVGAGDVG (KRAS G13D)
QVVFADDVA

SEQ ID NO: 93684 - protein, 9 aa, synthetic construct
  source 1..9: note = Seed: VVVGAGDVG (KRAS G13D)
QVVFADDVF

SEQ ID NO: 93685 - protein, 9 aa, synthetic construct
  source 1..9: note = Seed: VVVGAGDVG (KRAS G13D)
QVVFADDVI

SEQ ID NO: 93686 - protein, 9 aa, synthetic construct
  source 1..9: note = Seed: VVVGAGDVG (KRAS G13D)
QVVFADDVL

SEQ ID NO: 93687 - protein, 9 aa, synthetic construct
  source 1..9: note = Seed: VVVGAGDVG (KRAS G13D)
QVVFADDVM

SEQ ID NO: 93688 - protein, 9 aa, synthetic construct
  source 1..9: note = Seed: VVVGAGDVG (KRAS G13D)
QVVFADDVV

SEQ ID NO: 93689 - protein, 9 aa, synthetic construct
  source 1..9: note = Seed: VVVGAGDVG (KRAS G13D)
QVVFAEDVI

SEQ ID NO: 93690 - protein, 9 aa, synthetic construct
  source 1..9: note = Seed: VVVGAGDVG (KRAS G13D)
QVVFAEDVL

SEQ ID NO: 93691 - protein, 9 aa, synthetic construct
  source 1..9: note = Seed: VVVGAGDVG (KRAS G13D)
QVVFAIDVA

SEQ ID NO: 93692 - protein, 9 aa, synthetic construct
  source 1..9: note = Seed: VVVGAGDVG (KRAS G13D)
QVVFAIDVI

SEQ ID NO: 93693 - protein, 9 aa, synthetic construct
  source 1..9: note = Seed: VVVGAGDVG (KRAS G13D)
QVVFAIDVM

SEQ ID NO: 93694 - protein, 9 aa, synthetic construct
  source 1..9: note = Seed: VVVGAGDVG (KRAS G13D)
QVVFAIDVQ

SEQ ID NO: 93695 - protein, 9 aa, synthetic construct
  source 1..9: note = Seed: VVVGAGDVG (KRAS G13D)
QVVFAIDVS

SEQ ID NO: 93696 - protein, 9 aa, synthetic construct
  source 1..9: note = Seed: VVVGAGDVG (KRAS G13D)
QVVFAIDVV

SEQ ID NO: 93697 - protein, 9 aa, synthetic construct
  source 1..9: note = Seed: VVVGAGDVG (KRAS G13D)
QVVFALDVA

SEQ ID NO: 93698 - protein, 9 aa, synthetic construct
  source 1..9: note = Seed: VVVGAGDVG (KRAS G13D)
QVVFALDVM

SEQ ID NO: 93699 - protein, 9 aa, synthetic construct
  source 1..9: note = Seed: VVVGAGDVG (KRAS G13D)
QVVFALDVV

SEQ ID NO: 93700 - protein, 9 aa, synthetic construct
  source 1..9: note = Seed: VVVGAGDVG (KRAS G13D)
QVVFAMDVA

SEQ ID NO: 93701 - protein, 9 aa, synthetic construct
  source 1..9: note = Seed: VVVGAGDVG (KRAS G13D)
QVVFAMDVM

SEQ ID NO: 93702 - protein, 9 aa, synthetic construct
  source 1..9: note = Seed: VVVGAGDVG (KRAS G13D)
QVVFAMDVS

SEQ ID NO: 93703 - protein, 9 aa, synthetic construct
  source 1..9: note = Seed: VVVGAGDVG (KRAS G13D)
QVVFANDVA

SEQ ID NO: 93704 - protein, 9 aa, synthetic construct
  source 1..9: note = Seed: VVVGAGDVG (KRAS G13D)
QVVFANDVC

SEQ ID NO: 93705 - protein, 9 aa, synthetic construct
  source 1..9: note = Seed: VVVGAGDVG (KRAS G13D)
QVVFANDVD

SEQ ID NO: 93706 - protein, 9 aa, synthetic construct
  source 1..9: note = Seed: VVVGAGDVG (KRAS G13D)
QVVFANDVE

SEQ ID NO: 93707 - protein, 9 aa, synthetic construct
  source 1..9: note = Seed: VVVGAGDVG (KRAS G13D)
QVVFANDVG

SEQ ID NO: 93708 - protein, 9 aa, synthetic construct
  source 1..9: note = Seed: VVVGAGDVG (KRAS G13D)
QVVFANDVI

SEQ ID NO: 93709 - protein, 9 aa, synthetic construct
  source 1..9: note = Seed: VVVGAGDVG (KRAS G13D)
QVVFANDVL

SEQ ID NO: 93710 - protein, 9 aa, synthetic construct
  source 1..9: note = Seed: VVVGAGDVG (KRAS G13D)
QVVFANDVM

SEQ ID NO: 93711 - protein, 9 aa, synthetic construct
  source 1..9: note = Seed: VVVGAGDVG (KRAS G13D)
QVVFANDVN

SEQ ID NO: 93712 - protein, 9 aa, synthetic construct
  source 1..9: note = Seed: VVVGAGDVG (KRAS G13D)
QVVFANDVQ

SEQ ID NO: 93713 - protein, 9 aa, synthetic construct
  source 1..9: note = Seed: VVVGAGDVG (KRAS G13D)
QVVFANDVS

SEQ ID NO: 93714 - protein, 9 aa, synthetic construct
  source 1..9: note = Seed: VVVGAGDVG (KRAS G13D)
QVVFANDVT

SEQ ID NO: 93715 - protein, 9 aa, synthetic construct
  source 1..9: note = Seed: VVVGAGDVG (KRAS G13D)
QVVFANDVV

SEQ ID NO: 93716 - protein, 9 aa, synthetic construct
  source 1..9: note = Seed: VVVGAGDVG (KRAS G13D)
QVVFAPDVA

SEQ ID NO: 93717 - protein, 9 aa, synthetic construct
  source 1..9: note = Seed: VVVGAGDVG (KRAS G13D)
QVVFAPDVI

SEQ ID NO: 93718 - protein, 9 aa, synthetic construct
  source 1..9: note = Seed: VVVGAGDVG (KRAS G13D)
QVVFAPDVM

SEQ ID NO: 93719 - protein, 9 aa, synthetic construct
  source 1..9: note = Seed: VVVGAGDVG (KRAS G13D)
QVVFAPDVV

SEQ ID NO: 93720 - protein, 9 aa, synthetic construct
  source 1..9: note = Seed: VVVGAGDVG (KRAS G13D)
QVVFASDVA

SEQ ID NO: 93721 - protein, 9 aa, synthetic construct
  source 1..9: note = Seed: VVVGAGDVG (KRAS G13D)
QVVFASDVF

SEQ ID NO: 93722 - protein, 9 aa, synthetic construct
  source 1..9: note = Seed: VVVGAGDVG (KRAS G13D)
QVVFASDVI

SEQ ID NO: 93723 - protein, 9 aa, synthetic construct
  source 1..9: note = Seed: VVVGAGDVG (KRAS G13D)
QVVFASDVL

SEQ ID NO: 93724 - protein, 9 aa, synthetic construct
  source 1..9: note = Seed: VVVGAGDVG (KRAS G13D)
QVVFASDVM

SEQ ID NO: 93725 - protein, 9 aa, synthetic construct
  source 1..9: note = Seed: VVVGAGDVG (KRAS G13D)
QVVFASDVV

SEQ ID NO: 93726 - protein, 9 aa, synthetic construct
  source 1..9: note = Seed: VVVGAGDVG (KRAS G13D)
QVVFATDVA

SEQ ID NO: 93727 - protein, 9 aa, synthetic construct
  source 1..9: note = Seed: VVVGAGDVG (KRAS G13D)
QVVFATDVI

SEQ ID NO: 93728 - protein, 9 aa, synthetic construct
  source 1..9: note = Seed: VVVGAGDVG (KRAS G13D)
QVVFATDVM

SEQ ID NO: 93729 - protein, 9 aa, synthetic construct
  source 1..9: note = Seed: VVVGAGDVG (KRAS G13D)
QVVFATDVV

SEQ ID NO: 93730 - protein, 9 aa, synthetic construct
  source 1..9: note = Seed: VVVGAGDVG (KRAS G13D)
QVVFAVDVA

SEQ ID NO: 93731 - protein, 9 aa, synthetic construct
  source 1..9: note = Seed: VVVGAGDVG (KRAS G13D)
QVVFAVDVL

SEQ ID NO: 93732 - protein, 9 aa, synthetic construct
  source 1..9: note = Seed: VVVGAGDVG (KRAS G13D)
QVVFAVDVM

SEQ ID NO: 93733 - protein, 9 aa, synthetic construct
  source 1..9: note = Seed: VVVGAGDVG (KRAS G13D)
QVVIAADVV

SEQ ID NO: 93734 - protein, 9 aa, synthetic construct
  source 1..9: note = Seed: VVVGAGDVG (KRAS G13D)
QVVIANDVA

SEQ ID NO: 93735 - protein, 9 aa, synthetic construct
  source 1..9: note = Seed: VVVGAGDVG (KRAS G13D)
QVVIANDVI

SEQ ID NO: 93736 - protein, 9 aa, synthetic construct
  source 1..9: note = Seed: VVVGAGDVG (KRAS G13D)
QVVIANDVL

SEQ ID NO: 93737 - protein, 9 aa, synthetic construct
  source 1..9: note = Seed: VVVGAGDVG (KRAS G13D)
QVVIANDVM

SEQ ID NO: 93738 - protein, 9 aa, synthetic construct
  source 1..9: note = Seed: VVVGAGDVG (KRAS G13D)
QVVIANDVV

SEQ ID NO: 93739 - protein, 9 aa, synthetic construct
  source 1..9: note = Seed: VVVGAGDVG (KRAS G13D)
QVVIASDVM

SEQ ID NO: 93740 - protein, 9 aa, synthetic construct
  source 1..9: note = Seed: VVVGAGDVG (KRAS G13D)
QVVLAADVC

SEQ ID NO: 93741 - protein, 9 aa, synthetic construct
  source 1..9: note = Seed: VVVGAGDVG (KRAS G13D)
QVVLAADVG

SEQ ID NO: 93742 - protein, 9 aa, synthetic construct
  source 1..9: note = Seed: VVVGAGDVG (KRAS G13D)
QVVLAADVS

SEQ ID NO: 93743 - protein, 9 aa, synthetic construct
  source 1..9: note = Seed: VVVGAGDVG (KRAS G13D)
QVVLAGDVA

SEQ ID NO: 93744 - protein, 9 aa, synthetic construct
  source 1..9: note = Seed: VVVGAGDVG (KRAS G13D)
QVVLANDVV

SEQ ID NO: 93745 - protein, 9 aa, synthetic construct
  source 1..9: note = Seed: VVVGAGDVG (KRAS G13D)
QVVLAPDVA

SEQ ID NO: 93746 - protein, 9 aa, synthetic construct
  source 1..9: note = Seed: VVVGAGDVG (KRAS G13D)
QVVLAPDVI

SEQ ID NO: 93747 - protein, 9 aa, synthetic construct
  source 1..9: note = Seed: VVVGAGDVG (KRAS G13D)
QVVLAPDVL

SEQ ID NO: 93748 - protein, 9 aa, synthetic construct
  source 1..9: note = Seed: VVVGAGDVG (KRAS G13D)
QVVLAPDVM

SEQ ID NO: 93749 - protein, 9 aa, synthetic construct
  source 1..9: note = Seed: VVVGAGDVG (KRAS G13D)
QVVLAPDVN

SEQ ID NO: 93750 - protein, 9 aa, synthetic construct
  source 1..9: note = Seed: VVVGAGDVG (KRAS G13D)
QVVLAPDVS

SEQ ID NO: 93751 - protein, 9 aa, synthetic construct
  source 1..9: note = Seed: VVVGAGDVG (KRAS G13D)
QVVLAPDVT

SEQ ID NO: 93752 - protein, 9 aa, synthetic construct
  source 1..9: note = Seed: VVVGAGDVG (KRAS G13D)
QVVLAPDVV

SEQ ID NO: 93753 - protein, 9 aa, synthetic construct
  source 1..9: note = Seed: VVVGAGDVG (KRAS G13D)
QVVLASDVC

SEQ ID NO: 93754 - protein, 9 aa, synthetic construct
  source 1..9: note = Seed: VVVGAGDVG (KRAS G13D)
QVVLASDVI

SEQ ID NO: 93755 - protein, 9 aa, synthetic construct
  source 1..9: note = Seed: VVVGAGDVG (KRAS G13D)
QVVLASDVS

SEQ ID NO: 93756 - protein, 9 aa, synthetic construct
  source 1..9: note = Seed: VVVGAGDVG (KRAS G13D)
QVVLASDVV

SEQ ID NO: 93757 - protein, 9 aa, synthetic construct
  source 1..9: note = Seed: VVVGAGDVG (KRAS G13D)
QVVLATDVA

SEQ ID NO: 93758 - protein, 9 aa, synthetic construct
  source 1..9: note = Seed: VVVGAGDVG (KRAS G13D)
QVVLATDVG

SEQ ID NO: 93759 - protein, 9 aa, synthetic construct
  source 1..9: note = Seed: VVVGAGDVG (KRAS G13D)
QVVLATDVS

SEQ ID NO: 93760 - protein, 9 aa, synthetic construct
  source 1..9: note = Seed: VVVGAGDVG (KRAS G13D)
QVVLATDVT

SEQ ID NO: 93761 - protein, 9 aa, synthetic construct
  source 1..9: note = Seed: VVVGAGDVG (KRAS G13D)
QVVMAADVC

SEQ ID NO: 93762 - protein, 9 aa, synthetic construct
  source 1..9: note = Seed: VVVGAGDVG (KRAS G13D)
QVVMAADVG

SEQ ID NO: 93763 - protein, 9 aa, synthetic construct
  source 1..9: note = Seed: VVVGAGDVG (KRAS G13D)
QVVMAADVN

SEQ ID NO: 93764 - protein, 9 aa, synthetic construct
  source 1..9: note = Seed: VVVGAGDVG (KRAS G13D)
QVVMAADVS

SEQ ID NO: 93765 - protein, 9 aa, synthetic construct
  source 1..9: note = Seed: VVVGAGDVG (KRAS G13D)
QVVMAADVT

SEQ ID NO: 93766 - protein, 9 aa, synthetic construct
  source 1..9: note = Seed: VVVGAGDVG (KRAS G13D)
QVVMAADVV

SEQ ID NO: 93767 - protein, 9 aa, synthetic construct
  source 1..9: note = Seed: VVVGAGDVG (KRAS G13D)
QVVMAGDVA

SEQ ID NO: 93768 - protein, 9 aa, synthetic construct
  source 1..9: note = Seed: VVVGAGDVG (KRAS G13D)
QVVMAGDVM

SEQ ID NO: 93769 - protein, 9 aa, synthetic construct
  source 1..9: note = Seed: VVVGAGDVG (KRAS G13D)
QVVMAGDVV

SEQ ID NO: 93770 - protein, 9 aa, synthetic construct
  source 1..9: note = Seed: VVVGAGDVG (KRAS G13D)
QVVMAIDVA

SEQ ID NO: 93771 - protein, 9 aa, synthetic construct
  source 1..9: note = Seed: VVVGAGDVG (KRAS G13D)
QVVMAIDVS

SEQ ID NO: 93772 - protein, 9 aa, synthetic construct
  source 1..9: note = Seed: VVVGAGDVG (KRAS G13D)
QVVMALDVA

SEQ ID NO: 93773 - protein, 9 aa, synthetic construct
  source 1..9: note = Seed: VVVGAGDVG (KRAS G13D)
QVVMAMDVS

SEQ ID NO: 93774 - protein, 9 aa, synthetic construct
  source 1..9: note = Seed: VVVGAGDVG (KRAS G13D)
QVVMANDVA

SEQ ID NO: 93775 - protein, 9 aa, synthetic construct
  source 1..9: note = Seed: VVVGAGDVG (KRAS G13D)
QVVMANDVC

SEQ ID NO: 93776 - protein, 9 aa, synthetic construct
  source 1..9: note = Seed: VVVGAGDVG (KRAS G13D)
QVVMANDVI

SEQ ID NO: 93777 - protein, 9 aa, synthetic construct
  source 1..9: note = Seed: VVVGAGDVG (KRAS G13D)
QVVMANDVS

SEQ ID NO: 93778 - protein, 9 aa, synthetic construct
  source 1..9: note = Seed: VVVGAGDVG (KRAS G13D)
QVVMANDVV

SEQ ID NO: 93779 - protein, 9 aa, synthetic construct
  source 1..9: note = Seed: VVVGAGDVG (KRAS G13D)
QVVMAPDVA

SEQ ID NO: 93780 - protein, 9 aa, synthetic construct
  source 1..9: note = Seed: VVVGAGDVG (KRAS G13D)
QVVMAPDVI

SEQ ID NO: 93781 - protein, 9 aa, synthetic construct
  source 1..9: note = Seed: VVVGAGDVG (KRAS G13D)
QVVMAPDVL

SEQ ID NO: 93782 - protein, 9 aa, synthetic construct
  source 1..9: note = Seed: VVVGAGDVG (KRAS G13D)
QVVMAPDVM

SEQ ID NO: 93783 - protein, 9 aa, synthetic construct
  source 1..9: note = Seed: VVVGAGDVG (KRAS G13D)
QVVMAPDVN

SEQ ID NO: 93784 - protein, 9 aa, synthetic construct
  source 1..9: note = Seed: VVVGAGDVG (KRAS G13D)
QVVMAPDVS

SEQ ID NO: 93785 - protein, 9 aa, synthetic construct
  source 1..9: note = Seed: VVVGAGDVG (KRAS G13D)
QVVMAPDVT

SEQ ID NO: 93786 - protein, 9 aa, synthetic construct
  source 1..9: note = Seed: VVVGAGDVG (KRAS G13D)
QVVMAPDVV

SEQ ID NO: 93787 - protein, 9 aa, synthetic construct
  source 1..9: note = Seed: VVVGAGDVG (KRAS G13D)
QVVMASDVA

SEQ ID NO: 93788 - protein, 9 aa, synthetic construct
  source 1..9: note = Seed: VVVGAGDVG (KRAS G13D)
QVVMASDVC

SEQ ID NO: 93789 - protein, 9 aa, synthetic construct
  source 1..9: note = Seed: VVVGAGDVG (KRAS G13D)
QVVMASDVG

SEQ ID NO: 93790 - protein, 9 aa, synthetic construct
  source 1..9: note = Seed: VVVGAGDVG (KRAS G13D)
QVVMASDVI

SEQ ID NO: 93791 - protein, 9 aa, synthetic construct
  source 1..9: note = Seed: VVVGAGDVG (KRAS G13D)
QVVMASDVN

SEQ ID NO: 93792 - protein, 9 aa, synthetic construct
  source 1..9: note = Seed: VVVGAGDVG (KRAS G13D)
QVVMASDVS

SEQ ID NO: 93793 - protein, 9 aa, synthetic construct
  source 1..9: note = Seed: VVVGAGDVG (KRAS G13D)
QVVMASDVV

SEQ ID NO: 93794 - protein, 9 aa, synthetic construct
  source 1..9: note = Seed: VVVGAGDVG (KRAS G13D)
QVVMATDVA

SEQ ID NO: 93795 - protein, 9 aa, synthetic construct
  source 1..9: note = Seed: VVVGAGDVG (KRAS G13D)
QVVMATDVG

SEQ ID NO: 93796 - protein, 9 aa, synthetic construct
  source 1..9: note = Seed: VVVGAGDVG (KRAS G13D)
QVVMATDVI

SEQ ID NO: 93797 - protein, 9 aa, synthetic construct
  source 1..9: note = Seed: VVVGAGDVG (KRAS G13D)
QVVMATDVM

SEQ ID NO: 93798 - protein, 9 aa, synthetic construct
  source 1..9: note = Seed: VVVGAGDVG (KRAS G13D)
QVVMATDVN

SEQ ID NO: 93799 - protein, 9 aa, synthetic construct
  source 1..9: note = Seed: VVVGAGDVG (KRAS G13D)
QVVMATDVS

SEQ ID NO: 93800 - protein, 9 aa, synthetic construct
  source 1..9: note = Seed: VVVGAGDVG (KRAS G13D)
QVVMATDVT

SEQ ID NO: 93801 - protein, 9 aa, synthetic construct
  source 1..9: note = Seed: VVVGAGDVG (KRAS G13D)
QVVMATDVV

SEQ ID NO: 93802 - protein, 9 aa, synthetic construct
  source 1..9: note = Seed: VVVGAGDVG (KRAS G13D)
QVVMAVDVA

SEQ ID NO: 93803 - protein, 9 aa, synthetic construct
  source 1..9: note = Seed: VVVGAGDVG (KRAS G13D)
QVVMAVDVS

SEQ ID NO: 93804 - protein, 9 aa, synthetic construct
  source 1..9: note = Seed: VVVGAGDVG (KRAS G13D)
QVVMAVDVV

SEQ ID NO: 93805 - protein, 9 aa, synthetic construct
  source 1..9: note = Seed: VVVGAGDVG (KRAS G13D)
QVVWAADVA

SEQ ID NO: 93806 - protein, 9 aa, synthetic construct
  source 1..9: note = Seed: VVVGAGDVG (KRAS G13D)
QVVWAADVC

SEQ ID NO: 93807 - protein, 9 aa, synthetic construct
  source 1..9: note = Seed: VVVGAGDVG (KRAS G13D)
QVVWAADVI

SEQ ID NO: 93808 - protein, 9 aa, synthetic construct
  source 1..9: note = Seed: VVVGAGDVG (KRAS G13D)
QVVWAADVL

SEQ ID NO: 93809 - protein, 9 aa, synthetic construct
  source 1..9: note = Seed: VVVGAGDVG (KRAS G13D)
QVVWAADVM

SEQ ID NO: 93810 - protein, 9 aa, synthetic construct
  source 1..9: note = Seed: VVVGAGDVG (KRAS G13D)
QVVWAADVS

SEQ ID NO: 93811 - protein, 9 aa, synthetic construct
  source 1..9: note = Seed: VVVGAGDVG (KRAS G13D)
QVVWAADVT

SEQ ID NO: 93812 - protein, 9 aa, synthetic construct
  source 1..9: note = Seed: VVVGAGDVG (KRAS G13D)
QVVWAADVV

SEQ ID NO: 93813 - protein, 9 aa, synthetic construct
  source 1..9: note = Seed: VVVGAGDVG (KRAS G13D)
QVVWADDVA

SEQ ID NO: 93814 - protein, 9 aa, synthetic construct
  source 1..9: note = Seed: VVVGAGDVG (KRAS G13D)
QVVWADDVF

SEQ ID NO: 93815 - protein, 9 aa, synthetic construct
  source 1..9: note = Seed: VVVGAGDVG (KRAS G13D)
QVVWADDVI

SEQ ID NO: 93816 - protein, 9 aa, synthetic construct
  source 1..9: note = Seed: VVVGAGDVG (KRAS G13D)
QVVWADDVL

SEQ ID NO: 93817 - protein, 9 aa, synthetic construct
  source 1..9: note = Seed: VVVGAGDVG (KRAS G13D)
QVVWADDVM

SEQ ID NO: 93818 - protein, 9 aa, synthetic construct
  source 1..9: note = Seed: VVVGAGDVG (KRAS G13D)
QVVWADDVV

SEQ ID NO: 93819 - protein, 9 aa, synthetic construct
  source 1..9: note = Seed: VVVGAGDVG (KRAS G13D)
QVVWADDVY

SEQ ID NO: 93820 - protein, 9 aa, synthetic construct
  source 1..9: note = Seed: VVVGAGDVG (KRAS G13D)
QVVWAEDVI

SEQ ID NO: 93821 - protein, 9 aa, synthetic construct
  source 1..9: note = Seed: VVVGAGDVG (KRAS G13D)
QVVWAEDVL

SEQ ID NO: 93822 - protein, 9 aa, synthetic construct
  source 1..9: note = Seed: VVVGAGDVG (KRAS G13D)
QVVWAEDVM

SEQ ID NO: 93823 - protein, 9 aa, synthetic construct
  source 1..9: note = Seed: VVVGAGDVG (KRAS G13D)
QVVWAEDVV

SEQ ID NO: 93824 - protein, 9 aa, synthetic construct
  source 1..9: note = Seed: VVVGAGDVG (KRAS G13D)
QVVWAEDVW

SEQ ID NO: 93825 - protein, 9 aa, synthetic construct
  source 1..9: note = Seed: VVVGAGDVG (KRAS G13D)
QVVWAEDVY

SEQ ID NO: 93826 - protein, 9 aa, synthetic construct
  source 1..9: note = Seed: VVVGAGDVG (KRAS G13D)
QVVWAGDVL

SEQ ID NO: 93827 - protein, 9 aa, synthetic construct
  source 1..9: note = Seed: VVVGAGDVG (KRAS G13D)
QVVWAIDVA

SEQ ID NO: 93828 - protein, 9 aa, synthetic construct
  source 1..9: note = Seed: VVVGAGDVG (KRAS G13D)
QVVWAIDVE

SEQ ID NO: 93829 - protein, 9 aa, synthetic construct
  source 1..9: note = Seed: VVVGAGDVG (KRAS G13D)
QVVWAIDVI

SEQ ID NO: 93830 - protein, 9 aa, synthetic construct
  source 1..9: note = Seed: VVVGAGDVG (KRAS G13D)
QVVWAIDVL

SEQ ID NO: 93831 - protein, 9 aa, synthetic construct
  source 1..9: note = Seed: VVVGAGDVG (KRAS G13D)
QVVWAIDVM

SEQ ID NO: 93832 - protein, 9 aa, synthetic construct
  source 1..9: note = Seed: VVVGAGDVG (KRAS G13D)
QVVWAIDVQ

SEQ ID NO: 93833 - protein, 9 aa, synthetic construct
  source 1..9: note = Seed: VVVGAGDVG (KRAS G13D)
QVVWAIDVS

SEQ ID NO: 93834 - protein, 9 aa, synthetic construct
  source 1..9: note = Seed: VVVGAGDVG (KRAS G13D)
QVVWAIDVT

SEQ ID NO: 93835 - protein, 9 aa, synthetic construct
  source 1..9: note = Seed: VVVGAGDVG (KRAS G13D)
QVVWAIDVV

SEQ ID NO: 93836 - protein, 9 aa, synthetic construct
  source 1..9: note = Seed: VVVGAGDVG (KRAS G13D)
QVVWALDVA

SEQ ID NO: 93837 - protein, 9 aa, synthetic construct
  source 1..9: note = Seed: VVVGAGDVG (KRAS G13D)
QVVWALDVI

SEQ ID NO: 93838 - protein, 9 aa, synthetic construct
  source 1..9: note = Seed: VVVGAGDVG (KRAS G13D)
QVVWALDVL

SEQ ID NO: 93839 - protein, 9 aa, synthetic construct
  source 1..9: note = Seed: VVVGAGDVG (KRAS G13D)
QVVWALDVM

SEQ ID NO: 93840 - protein, 9 aa, synthetic construct
  source 1..9: note = Seed: VVVGAGDVG (KRAS G13D)
QVVWALDVQ

SEQ ID NO: 93841 - protein, 9 aa, synthetic construct
  source 1..9: note = Seed: VVVGAGDVG (KRAS G13D)
QVVWALDVS

SEQ ID NO: 93842 - protein, 9 aa, synthetic construct
  source 1..9: note = Seed: VVVGAGDVG (KRAS G13D)
QVVWALDVV

SEQ ID NO: 93843 - protein, 9 aa, synthetic construct
  source 1..9: note = Seed: VVVGAGDVG (KRAS G13D)
QVVWAMDVM

SEQ ID NO: 93844 - protein, 9 aa, synthetic construct
  source 1..9: note = Seed: VVVGAGDVG (KRAS G13D)
QVVWAMDVS

SEQ ID NO: 93845 - protein, 9 aa, synthetic construct
  source 1..9: note = Seed: VVVGAGDVG (KRAS G13D)
QVVWANDVA

SEQ ID NO: 93846 - protein, 9 aa, synthetic construct
  source 1..9: note = Seed: VVVGAGDVG (KRAS G13D)
QVVWANDVC

SEQ ID NO: 93847 - protein, 9 aa, synthetic construct
  source 1..9: note = Seed: VVVGAGDVG (KRAS G13D)
QVVWANDVD

SEQ ID NO: 93848 - protein, 9 aa, synthetic construct
  source 1..9: note = Seed: VVVGAGDVG (KRAS G13D)
QVVWANDVG

SEQ ID NO: 93849 - protein, 9 aa, synthetic construct
  source 1..9: note = Seed: VVVGAGDVG (KRAS G13D)
QVVWANDVI

SEQ ID NO: 93850 - protein, 9 aa, synthetic construct
  source 1..9: note = Seed: VVVGAGDVG (KRAS G13D)
QVVWANDVL

SEQ ID NO: 93851 - protein, 9 aa, synthetic construct
  source 1..9: note = Seed: VVVGAGDVG (KRAS G13D)
QVVWANDVM

SEQ ID NO: 93852 - protein, 9 aa, synthetic construct
  source 1..9: note = Seed: VVVGAGDVG (KRAS G13D)
QVVWANDVQ

SEQ ID NO: 93853 - protein, 9 aa, synthetic construct
  source 1..9: note = Seed: VVVGAGDVG (KRAS G13D)
QVVWANDVS

SEQ ID NO: 93854 - protein, 9 aa, synthetic construct
  source 1..9: note = Seed: VVVGAGDVG (KRAS G13D)
QVVWANDVV

SEQ ID NO: 93855 - protein, 9 aa, synthetic construct
  source 1..9: note = Seed: VVVGAGDVG (KRAS G13D)
QVVWAPDVA

SEQ ID NO: 93856 - protein, 9 aa, synthetic construct
  source 1..9: note = Seed: VVVGAGDVG (KRAS G13D)
QVVWAPDVI

SEQ ID NO: 93857 - protein, 9 aa, synthetic construct
  source 1..9: note = Seed: VVVGAGDVG (KRAS G13D)
QVVWAPDVL

SEQ ID NO: 93858 - protein, 9 aa, synthetic construct
  source 1..9: note = Seed: VVVGAGDVG (KRAS G13D)
QVVWAPDVM

SEQ ID NO: 93859 - protein, 9 aa, synthetic construct
  source 1..9: note = Seed: VVVGAGDVG (KRAS G13D)
QVVWAPDVV

SEQ ID NO: 93860 - protein, 9 aa, synthetic construct
  source 1..9: note = Seed: VVVGAGDVG (KRAS G13D)
QVVWASDVA

SEQ ID NO: 93861 - protein, 9 aa, synthetic construct
  source 1..9: note = Seed: VVVGAGDVG (KRAS G13D)
QVVWASDVI

SEQ ID NO: 93862 - protein, 9 aa, synthetic construct
  source 1..9: note = Seed: VVVGAGDVG (KRAS G13D)
QVVWASDVL

SEQ ID NO: 93863 - protein, 9 aa, synthetic construct
  source 1..9: note = Seed: VVVGAGDVG (KRAS G13D)
QVVWASDVM

SEQ ID NO: 93864 - protein, 9 aa, synthetic construct
  source 1..9: note = Seed: VVVGAGDVG (KRAS G13D)
QVVWASDVS

SEQ ID NO: 93865 - protein, 9 aa, synthetic construct
  source 1..9: note = Seed: VVVGAGDVG (KRAS G13D)
QVVWASDVV

SEQ ID NO: 93866 - protein, 9 aa, synthetic construct
  source 1..9: note = Seed: VVVGAGDVG (KRAS G13D)
QVVWATDVA

SEQ ID NO: 93867 - protein, 9 aa, synthetic construct
  source 1..9: note = Seed: VVVGAGDVG (KRAS G13D)
QVVWATDVF

SEQ ID NO: 93868 - protein, 9 aa, synthetic construct
  source 1..9: note = Seed: VVVGAGDVG (KRAS G13D)
QVVWATDVI

SEQ ID NO: 93869 - protein, 9 aa, synthetic construct
  source 1..9: note = Seed: VVVGAGDVG (KRAS G13D)
QVVWATDVL

SEQ ID NO: 93870 - protein, 9 aa, synthetic construct
  source 1..9: note = Seed: VVVGAGDVG (KRAS G13D)
QVVWATDVM

SEQ ID NO: 93871 - protein, 9 aa, synthetic construct
  source 1..9: note = Seed: VVVGAGDVG (KRAS G13D)
QVVWATDVV

SEQ ID NO: 93872 - protein, 9 aa, synthetic construct
  source 1..9: note = Seed: VVVGAGDVG (KRAS G13D)
QVVWATDVW

SEQ ID NO: 93873 - protein, 9 aa, synthetic construct
  source 1..9: note = Seed: VVVGAGDVG (KRAS G13D)
QVVWAVDVA

SEQ ID NO: 93874 - protein, 9 aa, synthetic construct
  source 1..9: note = Seed: VVVGAGDVG (KRAS G13D)
QVVWAVDVE

SEQ ID NO: 93875 - protein, 9 aa, synthetic construct
  source 1..9: note = Seed: VVVGAGDVG (KRAS G13D)
QVVWAVDVI

SEQ ID NO: 93876 - protein, 9 aa, synthetic construct
  source 1..9: note = Seed: VVVGAGDVG (KRAS G13D)
QVVWAVDVL

SEQ ID NO: 93877 - protein, 9 aa, synthetic construct
  source 1..9: note = Seed: VVVGAGDVG (KRAS G13D)
QVVWAVDVM

SEQ ID NO: 93878 - protein, 9 aa, synthetic construct
  source 1..9: note = Seed: VVVGAGDVG (KRAS G13D)
QVVWAVDVQ

SEQ ID NO: 93879 - protein, 9 aa, synthetic construct
  source 1..9: note = Seed: VVVGAGDVG (KRAS G13D)
QVVWAVDVS

SEQ ID NO: 93880 - protein, 9 aa, synthetic construct
  source 1..9: note = Seed: VVVGAGDVG (KRAS G13D)
QVVWAVDVT

SEQ ID NO: 93881 - protein, 9 aa, synthetic construct
  source 1..9: note = Seed: VVVGAGDVG (KRAS G13D)
QVVWAVDVV

SEQ ID NO: 93882 - protein, 9 aa, synthetic construct
  source 1..9: note = Seed: VVVGAGDVG (KRAS G13D)
QVVYAADVA

SEQ ID NO: 93883 - protein, 9 aa, synthetic construct
  source 1..9: note = Seed: VVVGAGDVG (KRAS G13D)
QVVYAADVI

SEQ ID NO: 93884 - protein, 9 aa, synthetic construct
  source 1..9: note = Seed: VVVGAGDVG (KRAS G13D)
QVVYAADVL

SEQ ID NO: 93885 - protein, 9 aa, synthetic construct
  source 1..9: note = Seed: VVVGAGDVG (KRAS G13D)
QVVYAADVM

SEQ ID NO: 93886 - protein, 9 aa, synthetic construct
  source 1..9: note = Seed: VVVGAGDVG (KRAS G13D)
QVVYAADVS

SEQ ID NO: 93887 - protein, 9 aa, synthetic construct
  source 1..9: note = Seed: VVVGAGDVG (KRAS G13D)
QVVYAADVV

SEQ ID NO: 93888 - protein, 9 aa, synthetic construct
  source 1..9: note = Seed: VVVGAGDVG (KRAS G13D)
QVVYADDVI

SEQ ID NO: 93889 - protein, 9 aa, synthetic construct
  source 1..9: note = Seed: VVVGAGDVG (KRAS G13D)
QVVYADDVL

SEQ ID NO: 93890 - protein, 9 aa, synthetic construct
  source 1..9: note = Seed: VVVGAGDVG (KRAS G13D)
QVVYAEDVL

SEQ ID NO: 93891 - protein, 9 aa, synthetic construct
  source 1..9: note = Seed: VVVGAGDVG (KRAS G13D)
QVVYAIDVA

SEQ ID NO: 93892 - protein, 9 aa, synthetic construct
  source 1..9: note = Seed: VVVGAGDVG (KRAS G13D)
QVVYAIDVL

SEQ ID NO: 93893 - protein, 9 aa, synthetic construct
  source 1..9: note = Seed: VVVGAGDVG (KRAS G13D)
QVVYAIDVM

SEQ ID NO: 93894 - protein, 9 aa, synthetic construct
  source 1..9: note = Seed: VVVGAGDVG (KRAS G13D)
QVVYAIDVS

SEQ ID NO: 93895 - protein, 9 aa, synthetic construct
  source 1..9: note = Seed: VVVGAGDVG (KRAS G13D)
QVVYAIDVV

SEQ ID NO: 93896 - protein, 9 aa, synthetic construct
  source 1..9: note = Seed: VVVGAGDVG (KRAS G13D)
QVVYALDVA

SEQ ID NO: 93897 - protein, 9 aa, synthetic construct
  source 1..9: note = Seed: VVVGAGDVG (KRAS G13D)
QVVYALDVI

SEQ ID NO: 93898 - protein, 9 aa, synthetic construct
  source 1..9: note = Seed: VVVGAGDVG (KRAS G13D)
QVVYALDVL

SEQ ID NO: 93899 - protein, 9 aa, synthetic construct
  source 1..9: note = Seed: VVVGAGDVG (KRAS G13D)
QVVYALDVM

SEQ ID NO: 93900 - protein, 9 aa, synthetic construct
  source 1..9: note = Seed: VVVGAGDVG (KRAS G13D)
QVVYALDVQ

SEQ ID NO: 93901 - protein, 9 aa, synthetic construct
  source 1..9: note = Seed: VVVGAGDVG (KRAS G13D)
QVVYALDVR

SEQ ID NO: 93902 - protein, 9 aa, synthetic construct
  source 1..9: note = Seed: VVVGAGDVG (KRAS G13D)
QVVYALDVS

SEQ ID NO: 93903 - protein, 9 aa, synthetic construct
  source 1..9: note = Seed: VVVGAGDVG (KRAS G13D)
QVVYALDVV

SEQ ID NO: 93904 - protein, 9 aa, synthetic construct
  source 1..9: note = Seed: VVVGAGDVG (KRAS G13D)
QVVYAMDVC

SEQ ID NO: 93905 - protein, 9 aa, synthetic construct
  source 1..9: note = Seed: VVVGAGDVG (KRAS G13D)
QVVYAMDVM

SEQ ID NO: 93906 - protein, 9 aa, synthetic construct
  source 1..9: note = Seed: VVVGAGDVG (KRAS G13D)
QVVYAMDVR

SEQ ID NO: 93907 - protein, 9 aa, synthetic construct
  source 1..9: note = Seed: VVVGAGDVG (KRAS G13D)
QVVYAMDVS

SEQ ID NO: 93908 - protein, 9 aa, synthetic construct
  source 1..9: note = Seed: VVVGAGDVG (KRAS G13D)
QVVYANDVA

SEQ ID NO: 93909 - protein, 9 aa, synthetic construct
  source 1..9: note = Seed: VVVGAGDVG (KRAS G13D)
QVVYANDVI

SEQ ID NO: 93910 - protein, 9 aa, synthetic construct
  source 1..9: note = Seed: VVVGAGDVG (KRAS G13D)
QVVYANDVL

SEQ ID NO: 93911 - protein, 9 aa, synthetic construct
  source 1..9: note = Seed: VVVGAGDVG (KRAS G13D)
QVVYANDVS

SEQ ID NO: 93912 - protein, 9 aa, synthetic construct
  source 1..9: note = Seed: VVVGAGDVG (KRAS G13D)
QVVYANDVV

SEQ ID NO: 93913 - protein, 9 aa, synthetic construct
  source 1..9: note = Seed: VVVGAGDVG (KRAS G13D)
QVVYAPDVI

SEQ ID NO: 93914 - protein, 9 aa, synthetic construct
  source 1..9: note = Seed: VVVGAGDVG (KRAS G13D)
QVVYAPDVL

SEQ ID NO: 93915 - protein, 9 aa, synthetic construct
  source 1..9: note = Seed: VVVGAGDVG (KRAS G13D)
QVVYAPDVM

SEQ ID NO: 93916 - protein, 9 aa, synthetic construct
  source 1..9: note = Seed: VVVGAGDVG (KRAS G13D)
QVVYAPDVV

SEQ ID NO: 93917 - protein, 9 aa, synthetic construct
  source 1..9: note = Seed: VVVGAGDVG (KRAS G13D)
QVVYASDVA

SEQ ID NO: 93918 - protein, 9 aa, synthetic construct
  source 1..9: note = Seed: VVVGAGDVG (KRAS G13D)
QVVYASDVF

SEQ ID NO: 93919 - protein, 9 aa, synthetic construct
  source 1..9: note = Seed: VVVGAGDVG (KRAS G13D)
QVVYASDVI

SEQ ID NO: 93920 - protein, 9 aa, synthetic construct
  source 1..9: note = Seed: VVVGAGDVG (KRAS G13D)
QVVYASDVL

SEQ ID NO: 93921 - protein, 9 aa, synthetic construct
  source 1..9: note = Seed: VVVGAGDVG (KRAS G13D)
QVVYASDVM

SEQ ID NO: 93922 - protein, 9 aa, synthetic construct
  source 1..9: note = Seed: VVVGAGDVG (KRAS G13D)
QVVYASDVV

SEQ ID NO: 93923 - protein, 9 aa, synthetic construct
  source 1..9: note = Seed: VVVGAGDVG (KRAS G13D)
QVVYATDVA

SEQ ID NO: 93924 - protein, 9 aa, synthetic construct
  source 1..9: note = Seed: VVVGAGDVG (KRAS G13D)
QVVYATDVI

SEQ ID NO: 93925 - protein, 9 aa, synthetic construct
  source 1..9: note = Seed: VVVGAGDVG (KRAS G13D)
QVVYATDVL

SEQ ID NO: 93926 - protein, 9 aa, synthetic construct
  source 1..9: note = Seed: VVVGAGDVG (KRAS G13D)
QVVYATDVM

SEQ ID NO: 93927 - protein, 9 aa, synthetic construct
  source 1..9: note = Seed: VVVGAGDVG (KRAS G13D)
QVVYAVDVA

SEQ ID NO: 93928 - protein, 9 aa, synthetic construct
  source 1..9: note = Seed: VVVGAGDVG (KRAS G13D)
QVVYAVDVF

SEQ ID NO: 93929 - protein, 9 aa, synthetic construct
  source 1..9: note = Seed: VVVGAGDVG (KRAS G13D)
QVVYAVDVI

SEQ ID NO: 93930 - protein, 9 aa, synthetic construct
  source 1..9: note = Seed: VVVGAGDVG (KRAS G13D)
QVVYAVDVL

SEQ ID NO: 93931 - protein, 9 aa, synthetic construct
  source 1..9: note = Seed: VVVGAGDVG (KRAS G13D)
QVVYAVDVM

SEQ ID NO: 93932 - protein, 9 aa, synthetic construct
  source 1..9: note = Seed: VVVGAGDVG (KRAS G13D)
QVVYAVDVQ

SEQ ID NO: 93933 - protein, 9 aa, synthetic construct
  source 1..9: note = Seed: VVVGAGDVG (KRAS G13D)
QVVYAVDVS

SEQ ID NO: 93934 - protein, 9 aa, synthetic construct
  source 1..9: note = Seed: VVVGAGDVG (KRAS G13D)
QVVYAVDVV

SEQ ID NO: 93935 - protein, 9 aa, synthetic construct
  source 1..9: note = Seed: VVVGAGDVG (KRAS G13D)
RVVFADDVA

SEQ ID NO: 93936 - protein, 9 aa, synthetic construct
  source 1..9: note = Seed: VVVGAGDVG (KRAS G13D)
RVVFADDVV

SEQ ID NO: 93937 - protein, 9 aa, synthetic construct
  source 1..9: note = Seed: VVVGAGDVG (KRAS G13D)
RVVFAIDVA

SEQ ID NO: 93938 - protein, 9 aa, synthetic construct
  source 1..9: note = Seed: VVVGAGDVG (KRAS G13D)
RVVFATDVM

SEQ ID NO: 93939 - protein, 9 aa, synthetic construct
  source 1..9: note = Seed: VVVGAGDVG (KRAS G13D)
RVVMAPDVV

SEQ ID NO: 93940 - protein, 9 aa, synthetic construct
  source 1..9: note = Seed: VVVGAGDVG (KRAS G13D)
RVVWADDVA

SEQ ID NO: 93941 - protein, 9 aa, synthetic construct
  source 1..9: note = Seed: VVVGAGDVG (KRAS G13D)
RVVWADDVI

SEQ ID NO: 93942 - protein, 9 aa, synthetic construct
  source 1..9: note = Seed: VVVGAGDVG (KRAS G13D)
RVVWADDVL

SEQ ID NO: 93943 - protein, 9 aa, synthetic construct
  source 1..9: note = Seed: VVVGAGDVG (KRAS G13D)
RVVWADDVM

SEQ ID NO: 93944 - protein, 9 aa, synthetic construct
  source 1..9: note = Seed: VVVGAGDVG (KRAS G13D)
RVVWADDVV

SEQ ID NO: 93945 - protein, 9 aa, synthetic construct
  source 1..9: note = Seed: VVVGAGDVG (KRAS G13D)
RVVWATDVA

SEQ ID NO: 93946 - protein, 9 aa, synthetic construct
  source 1..9: note = Seed: VVVGAGDVG (KRAS G13D)
RVVWATDVM

SEQ ID NO: 93947 - protein, 9 aa, synthetic construct
  source 1..9: note = Seed: VVVGAGDVG (KRAS G13D)
RVVWAVDVS

SEQ ID NO: 93948 - protein, 9 aa, synthetic construct
  source 1..9: note = Seed: VVVGAGDVG (KRAS G13D)
RVVYATDVA

SEQ ID NO: 93949 - protein, 9 aa, synthetic construct
  source 1..9: note = Seed: VVVGAGDVG (KRAS G13D)
SVVFAADVI

SEQ ID NO: 93950 - protein, 9 aa, synthetic construct
  source 1..9: note = Seed: VVVGAGDVG (KRAS G13D)
SVVFAADVM

SEQ ID NO: 93951 - protein, 9 aa, synthetic construct
  source 1..9: note = Seed: VVVGAGDVG (KRAS G13D)
SVVFAADVS

SEQ ID NO: 93952 - protein, 9 aa, synthetic construct
  source 1..9: note = Seed: VVVGAGDVG (KRAS G13D)
SVVFAADVV

SEQ ID NO: 93953 - protein, 9 aa, synthetic construct
  source 1..9: note = Seed: VVVGAGDVG (KRAS G13D)
SVVFADDVA

SEQ ID NO: 93954 - protein, 9 aa, synthetic construct
  source 1..9: note = Seed: VVVGAGDVG (KRAS G13D)
SVVFADDVF

SEQ ID NO: 93955 - protein, 9 aa, synthetic construct
  source 1..9: note = Seed: VVVGAGDVG (KRAS G13D)
SVVFADDVI

SEQ ID NO: 93956 - protein, 9 aa, synthetic construct
  source 1..9: note = Seed: VVVGAGDVG (KRAS G13D)
SVVFADDVL

SEQ ID NO: 93957 - protein, 9 aa, synthetic construct
  source 1..9: note = Seed: VVVGAGDVG (KRAS G13D)
SVVFADDVM

SEQ ID NO: 93958 - protein, 9 aa, synthetic construct
  source 1..9: note = Seed: VVVGAGDVG (KRAS G13D)
SVVFADDVV

SEQ ID NO: 93959 - protein, 9 aa, synthetic construct
  source 1..9: note = Seed: VVVGAGDVG (KRAS G13D)
SVVFAIDVA

SEQ ID NO: 93960 - protein, 9 aa, synthetic construct
  source 1..9: note = Seed: VVVGAGDVG (KRAS G13D)
SVVFAIDVM

SEQ ID NO: 93961 - protein, 9 aa, synthetic construct
  source 1..9: note = Seed: VVVGAGDVG (KRAS G13D)
SVVFAIDVS

SEQ ID NO: 93962 - protein, 9 aa, synthetic construct
  source 1..9: note = Seed: VVVGAGDVG (KRAS G13D)
SVVFALDVA

SEQ ID NO: 93963 - protein, 9 aa, synthetic construct
  source 1..9: note = Seed: VVVGAGDVG (KRAS G13D)
SVVFALDVM

SEQ ID NO: 93964 - protein, 9 aa, synthetic construct
  source 1..9: note = Seed: VVVGAGDVG (KRAS G13D)
SVVFANDVA

SEQ ID NO: 93965 - protein, 9 aa, synthetic construct
  source 1..9: note = Seed: VVVGAGDVG (KRAS G13D)
SVVFANDVQ

SEQ ID NO: 93966 - protein, 9 aa, synthetic construct
  source 1..9: note = Seed: VVVGAGDVG (KRAS G13D)
SVVFANDVS

SEQ ID NO: 93967 - protein, 9 aa, synthetic construct
  source 1..9: note = Seed: VVVGAGDVG (KRAS G13D)
SVVFANDVV

SEQ ID NO: 93968 - protein, 9 aa, synthetic construct
  source 1..9: note = Seed: VVVGAGDVG (KRAS G13D)
SVVFAPDVM

SEQ ID NO: 93969 - protein, 9 aa, synthetic construct
  source 1..9: note = Seed: VVVGAGDVG (KRAS G13D)
SVVFAPDVV

SEQ ID NO: 93970 - protein, 9 aa, synthetic construct
  source 1..9: note = Seed: VVVGAGDVG (KRAS G13D)
SVVFASDVA

SEQ ID NO: 93971 - protein, 9 aa, synthetic construct
  source 1..9: note = Seed: VVVGAGDVG (KRAS G13D)
SVVFASDVI

SEQ ID NO: 93972 - protein, 9 aa, synthetic construct
  source 1..9: note = Seed: VVVGAGDVG (KRAS G13D)
SVVFASDVM

SEQ ID NO: 93973 - protein, 9 aa, synthetic construct
  source 1..9: note = Seed: VVVGAGDVG (KRAS G13D)
SVVFASDVV

SEQ ID NO: 93974 - protein, 9 aa, synthetic construct
  source 1..9: note = Seed: VVVGAGDVG (KRAS G13D)
SVVFATDVA

SEQ ID NO: 93975 - protein, 9 aa, synthetic construct
  source 1..9: note = Seed: VVVGAGDVG (KRAS G13D)
SVVFATDVI

SEQ ID NO: 93976 - protein, 9 aa, synthetic construct
  source 1..9: note = Seed: VVVGAGDVG (KRAS G13D)
SVVFATDVM

SEQ ID NO: 93977 - protein, 9 aa, synthetic construct
  source 1..9: note = Seed: VVVGAGDVG (KRAS G13D)
SVVFAVDVA

SEQ ID NO: 93978 - protein, 9 aa, synthetic construct
  source 1..9: note = Seed: VVVGAGDVG (KRAS G13D)
SVVFAVDVM

SEQ ID NO: 93979 - protein, 9 aa, synthetic construct
  source 1..9: note = Seed: VVVGAGDVG (KRAS G13D)
SVVWAADVI

SEQ ID NO: 93980 - protein, 9 aa, synthetic construct
  source 1..9: note = Seed: VVVGAGDVG (KRAS G13D)
SVVWAADVL

SEQ ID NO: 93981 - protein, 9 aa, synthetic construct
  source 1..9: note = Seed: VVVGAGDVG (KRAS G13D)
SVVWAADVS

SEQ ID NO: 93982 - protein, 9 aa, synthetic construct
  source 1..9: note = Seed: VVVGAGDVG (KRAS G13D)
SVVWAADVV

SEQ ID NO: 93983 - protein, 9 aa, synthetic construct
  source 1..9: note = Seed: VVVGAGDVG (KRAS G13D)
SVVWADDVI

SEQ ID NO: 93984 - protein, 9 aa, synthetic construct
  source 1..9: note = Seed: VVVGAGDVG (KRAS G13D)
SVVWADDVL

SEQ ID NO: 93985 - protein, 9 aa, synthetic construct
  source 1..9: note = Seed: VVVGAGDVG (KRAS G13D)
SVVWADDVV

SEQ ID NO: 93986 - protein, 9 aa, synthetic construct
  source 1..9: note = Seed: VVVGAGDVG (KRAS G13D)
SVVWAIDVL

SEQ ID NO: 93987 - protein, 9 aa, synthetic construct
  source 1..9: note = Seed: VVVGAGDVG (KRAS G13D)
SVVWAIDVM

SEQ ID NO: 93988 - protein, 9 aa, synthetic construct
  source 1..9: note = Seed: VVVGAGDVG (KRAS G13D)
SVVWAIDVS

SEQ ID NO: 93989 - protein, 9 aa, synthetic construct
  source 1..9: note = Seed: VVVGAGDVG (KRAS G13D)
SVVWAIDVV

SEQ ID NO: 93990 - protein, 9 aa, synthetic construct
  source 1..9: note = Seed: VVVGAGDVG (KRAS G13D)
SVVWALDVL

SEQ ID NO: 93991 - protein, 9 aa, synthetic construct
  source 1..9: note = Seed: VVVGAGDVG (KRAS G13D)
SVVWALDVM

SEQ ID NO: 93992 - protein, 9 aa, synthetic construct
  source 1..9: note = Seed: VVVGAGDVG (KRAS G13D)
SVVWALDVQ

SEQ ID NO: 93993 - protein, 9 aa, synthetic construct
  source 1..9: note = Seed: VVVGAGDVG (KRAS G13D)
SVVWALDVV

SEQ ID NO: 93994 - protein, 9 aa, synthetic construct
  source 1..9: note = Seed: VVVGAGDVG (KRAS G13D)
SVVWANDVA

SEQ ID NO: 93995 - protein, 9 aa, synthetic construct
  source 1..9: note = Seed: VVVGAGDVG (KRAS G13D)
SVVWANDVI

SEQ ID NO: 93996 - protein, 9 aa, synthetic construct
  source 1..9: note = Seed: VVVGAGDVG (KRAS G13D)
SVVWANDVL

SEQ ID NO: 93997 - protein, 9 aa, synthetic construct
  source 1..9: note = Seed: VVVGAGDVG (KRAS G13D)
SVVWAPDVI

SEQ ID NO: 93998 - protein, 9 aa, synthetic construct
  source 1..9: note = Seed: VVVGAGDVG (KRAS G13D)
SVVWAPDVV

SEQ ID NO: 93999 - protein, 9 aa, synthetic construct
  source 1..9: note = Seed: VVVGAGDVG (KRAS G13D)
SVVWASDVA

SEQ ID NO: 94000 - protein, 9 aa, synthetic construct
  source 1..9: note = Seed: VVVGAGDVG (KRAS G13D)
SVVWASDVM

SEQ ID NO: 94001 - protein, 9 aa, synthetic construct
  source 1..9: note = Seed: VVVGAGDVG (KRAS G13D)
SVVWASDVV

SEQ ID NO: 94002 - protein, 9 aa, synthetic construct
  source 1..9: note = Seed: VVVGAGDVG (KRAS G13D)
SVVWATDVL

SEQ ID NO: 94003 - protein, 9 aa, synthetic construct
  source 1..9: note = Seed: VVVGAGDVG (KRAS G13D)
SVVWAVDVL

SEQ ID NO: 94004 - protein, 9 aa, synthetic construct
  source 1..9: note = Seed: VVVGAGDVG (KRAS G13D)
SVVWAVDVM

SEQ ID NO: 94005 - protein, 9 aa, synthetic construct
  source 1..9: note = Seed: VVVGAGDVG (KRAS G13D)
SVVWAVDVS

SEQ ID NO: 94006 - protein, 9 aa, synthetic construct
  source 1..9: note = Seed: VVVGAGDVG (KRAS G13D)
SVVWAVDVV

SEQ ID NO: 94007 - protein, 9 aa, synthetic construct
  source 1..9: note = Seed: VVVGAGDVG (KRAS G13D)
SVVYAADVI

SEQ ID NO: 94008 - protein, 9 aa, synthetic construct
  source 1..9: note = Seed: VVVGAGDVG (KRAS G13D)
SVVYAADVS

SEQ ID NO: 94009 - protein, 9 aa, synthetic construct
  source 1..9: note = Seed: VVVGAGDVG (KRAS G13D)
SVVYAADVV

SEQ ID NO: 94010 - protein, 9 aa, synthetic construct
  source 1..9: note = Seed: VVVGAGDVG (KRAS G13D)
SVVYAIDVS

SEQ ID NO: 94011 - protein, 9 aa, synthetic construct
  source 1..9: note = Seed: VVVGAGDVG (KRAS G13D)
SVVYALDVA

SEQ ID NO: 94012 - protein, 9 aa, synthetic construct
  source 1..9: note = Seed: VVVGAGDVG (KRAS G13D)
SVVYALDVI

SEQ ID NO: 94013 - protein, 9 aa, synthetic construct
  source 1..9: note = Seed: VVVGAGDVG (KRAS G13D)
SVVYALDVM

SEQ ID NO: 94014 - protein, 9 aa, synthetic construct
  source 1..9: note = Seed: VVVGAGDVG (KRAS G13D)
SVVYALDVS

SEQ ID NO: 94015 - protein, 9 aa, synthetic construct
  source 1..9: note = Seed: VVVGAGDVG (KRAS G13D)
SVVYALDVV

SEQ ID NO: 94016 - protein, 9 aa, synthetic construct
  source 1..9: note = Seed: VVVGAGDVG (KRAS G13D)
SVVYAMDVS

SEQ ID NO: 94017 - protein, 9 aa, synthetic construct
  source 1..9: note = Seed: VVVGAGDVG (KRAS G13D)
SVVYANDVA

SEQ ID NO: 94018 - protein, 9 aa, synthetic construct
  source 1..9: note = Seed: VVVGAGDVG (KRAS G13D)
SVVYANDVS

SEQ ID NO: 94019 - protein, 9 aa, synthetic construct
  source 1..9: note = Seed: VVVGAGDVG (KRAS G13D)
SVVYASDVA

SEQ ID NO: 94020 - protein, 9 aa, synthetic construct
  source 1..9: note = Seed: VVVGAGDVG (KRAS G13D)
SVVYASDVI

SEQ ID NO: 94021 - protein, 9 aa, synthetic construct
  source 1..9: note = Seed: VVVGAGDVG (KRAS G13D)
SVVYASDVM

SEQ ID NO: 94022 - protein, 9 aa, synthetic construct
  source 1..9: note = Seed: VVVGAGDVG (KRAS G13D)
SVVYASDVV

SEQ ID NO: 94023 - protein, 9 aa, synthetic construct
  source 1..9: note = Seed: VVVGAGDVG (KRAS G13D)
SVVYAVDVM

SEQ ID NO: 94024 - protein, 9 aa, synthetic construct
  source 1..9: note = Seed: VVVGAGDVG (KRAS G13D)
SVVYAVDVS

SEQ ID NO: 94025 - protein, 9 aa, synthetic construct
  source 1..9: note = Seed: VVVGAGDVG (KRAS G13D)
SVVYAVDVV

SEQ ID NO: 94026 - protein, 9 aa, synthetic construct
  source 1..9: note = Seed: VVVGAGDVG (KRAS G13D)
TVVFAADVF

SEQ ID NO: 94027 - protein, 9 aa, synthetic construct
  source 1..9: note = Seed: VVVGAGDVG (KRAS G13D)
TVVFAADVI

SEQ ID NO: 94028 - protein, 9 aa, synthetic construct
  source 1..9: note = Seed: VVVGAGDVG (KRAS G13D)
TVVFAADVL

SEQ ID NO: 94029 - protein, 9 aa, synthetic construct
  source 1..9: note = Seed: VVVGAGDVG (KRAS G13D)
TVVFAADVM

SEQ ID NO: 94030 - protein, 9 aa, synthetic construct
  source 1..9: note = Seed: VVVGAGDVG (KRAS G13D)
TVVFAADVV

SEQ ID NO: 94031 - protein, 9 aa, synthetic construct
  source 1..9: note = Seed: VVVGAGDVG (KRAS G13D)
TVVFADDVA

SEQ ID NO: 94032 - protein, 9 aa, synthetic construct
  source 1..9: note = Seed: VVVGAGDVG (KRAS G13D)
TVVFADDVF

SEQ ID NO: 94033 - protein, 9 aa, synthetic construct
  source 1..9: note = Seed: VVVGAGDVG (KRAS G13D)
TVVFADDVI

SEQ ID NO: 94034 - protein, 9 aa, synthetic construct
  source 1..9: note = Seed: VVVGAGDVG (KRAS G13D)
TVVFADDVL

SEQ ID NO: 94035 - protein, 9 aa, synthetic construct
  source 1..9: note = Seed: VVVGAGDVG (KRAS G13D)
TVVFADDVM

SEQ ID NO: 94036 - protein, 9 aa, synthetic construct
  source 1..9: note = Seed: VVVGAGDVG (KRAS G13D)
TVVFADDVV

SEQ ID NO: 94037 - protein, 9 aa, synthetic construct
  source 1..9: note = Seed: VVVGAGDVG (KRAS G13D)
TVVFAIDVA

SEQ ID NO: 94038 - protein, 9 aa, synthetic construct
  source 1..9: note = Seed: VVVGAGDVG (KRAS G13D)
TVVFAIDVM

SEQ ID NO: 94039 - protein, 9 aa, synthetic construct
  source 1..9: note = Seed: VVVGAGDVG (KRAS G13D)
TVVFAIDVS

SEQ ID NO: 94040 - protein, 9 aa, synthetic construct
  source 1..9: note = Seed: VVVGAGDVG (KRAS G13D)
TVVFALDVA

SEQ ID NO: 94041 - protein, 9 aa, synthetic construct
  source 1..9: note = Seed: VVVGAGDVG (KRAS G13D)
TVVFANDVA

SEQ ID NO: 94042 - protein, 9 aa, synthetic construct
  source 1..9: note = Seed: VVVGAGDVG (KRAS G13D)
TVVFANDVI

SEQ ID NO: 94043 - protein, 9 aa, synthetic construct
  source 1..9: note = Seed: VVVGAGDVG (KRAS G13D)
TVVFANDVS

SEQ ID NO: 94044 - protein, 9 aa, synthetic construct
  source 1..9: note = Seed: VVVGAGDVG (KRAS G13D)
TVVFANDVV

SEQ ID NO: 94045 - protein, 9 aa, synthetic construct
  source 1..9: note = Seed: VVVGAGDVG (KRAS G13D)
TVVFAPDVA

SEQ ID NO: 94046 - protein, 9 aa, synthetic construct
  source 1..9: note = Seed: VVVGAGDVG (KRAS G13D)
TVVFAPDVI

SEQ ID NO: 94047 - protein, 9 aa, synthetic construct
  source 1..9: note = Seed: VVVGAGDVG (KRAS G13D)
TVVFAPDVM

SEQ ID NO: 94048 - protein, 9 aa, synthetic construct
  source 1..9: note = Seed: VVVGAGDVG (KRAS G13D)
TVVFAPDVV

SEQ ID NO: 94049 - protein, 9 aa, synthetic construct
  source 1..9: note = Seed: VVVGAGDVG (KRAS G13D)
TVVFASDVA

SEQ ID NO: 94050 - protein, 9 aa, synthetic construct
  source 1..9: note = Seed: VVVGAGDVG (KRAS G13D)
TVVFASDVF

SEQ ID NO: 94051 - protein, 9 aa, synthetic construct
  source 1..9: note = Seed: VVVGAGDVG (KRAS G13D)
TVVFASDVI

SEQ ID NO: 94052 - protein, 9 aa, synthetic construct
  source 1..9: note = Seed: VVVGAGDVG (KRAS G13D)
TVVFASDVM

SEQ ID NO: 94053 - protein, 9 aa, synthetic construct
  source 1..9: note = Seed: VVVGAGDVG (KRAS G13D)
TVVFASDVV

SEQ ID NO: 94054 - protein, 9 aa, synthetic construct
  source 1..9: note = Seed: VVVGAGDVG (KRAS G13D)
TVVFATDVA

SEQ ID NO: 94055 - protein, 9 aa, synthetic construct
  source 1..9: note = Seed: VVVGAGDVG (KRAS G13D)
TVVFATDVI

SEQ ID NO: 94056 - protein, 9 aa, synthetic construct
  source 1..9: note = Seed: VVVGAGDVG (KRAS G13D)
TVVFAVDVA

SEQ ID NO: 94057 - protein, 9 aa, synthetic construct
  source 1..9: note = Seed: VVVGAGDVG (KRAS G13D)
TVVLAPDVA

SEQ ID NO: 94058 - protein, 9 aa, synthetic construct
  source 1..9: note = Seed: VVVGAGDVG (KRAS G13D)
TVVMAADVG

SEQ ID NO: 94059 - protein, 9 aa, synthetic construct
  source 1..9: note = Seed: VVVGAGDVG (KRAS G13D)
TVVMAADVS

SEQ ID NO: 94060 - protein, 9 aa, synthetic construct
  source 1..9: note = Seed: VVVGAGDVG (KRAS G13D)
TVVMANDVA

SEQ ID NO: 94061 - protein, 9 aa, synthetic construct
  source 1..9: note = Seed: VVVGAGDVG (KRAS G13D)
TVVMAPDVA

SEQ ID NO: 94062 - protein, 9 aa, synthetic construct
  source 1..9: note = Seed: VVVGAGDVG (KRAS G13D)
TVVMAPDVI

SEQ ID NO: 94063 - protein, 9 aa, synthetic construct
  source 1..9: note = Seed: VVVGAGDVG (KRAS G13D)
TVVMAPDVS

SEQ ID NO: 94064 - protein, 9 aa, synthetic construct
  source 1..9: note = Seed: VVVGAGDVG (KRAS G13D)
TVVMAPDVV

SEQ ID NO: 94065 - protein, 9 aa, synthetic construct
  source 1..9: note = Seed: VVVGAGDVG (KRAS G13D)
TVVMASDVA

SEQ ID NO: 94066 - protein, 9 aa, synthetic construct
  source 1..9: note = Seed: VVVGAGDVG (KRAS G13D)
TVVMASDVS

SEQ ID NO: 94067 - protein, 9 aa, synthetic construct
  source 1..9: note = Seed: VVVGAGDVG (KRAS G13D)
TVVMATDVA

SEQ ID NO: 94068 - protein, 9 aa, synthetic construct
  source 1..9: note = Seed: VVVGAGDVG (KRAS G13D)
TVVMATDVM

SEQ ID NO: 94069 - protein, 9 aa, synthetic construct
  source 1..9: note = Seed: VVVGAGDVG (KRAS G13D)
TVVWAADVA

SEQ ID NO: 94070 - protein, 9 aa, synthetic construct
  source 1..9: note = Seed: VVVGAGDVG (KRAS G13D)
TVVWAADVI

SEQ ID NO: 94071 - protein, 9 aa, synthetic construct
  source 1..9: note = Seed: VVVGAGDVG (KRAS G13D)
TVVWAADVL

SEQ ID NO: 94072 - protein, 9 aa, synthetic construct
  source 1..9: note = Seed: VVVGAGDVG (KRAS G13D)
TVVWAADVM

SEQ ID NO: 94073 - protein, 9 aa, synthetic construct
  source 1..9: note = Seed: VVVGAGDVG (KRAS G13D)
TVVWAADVS

SEQ ID NO: 94074 - protein, 9 aa, synthetic construct
  source 1..9: note = Seed: VVVGAGDVG (KRAS G13D)
TVVWAADVV

SEQ ID NO: 94075 - protein, 9 aa, synthetic construct
  source 1..9: note = Seed: VVVGAGDVG (KRAS G13D)
TVVWADDVA

SEQ ID NO: 94076 - protein, 9 aa, synthetic construct
  source 1..9: note = Seed: VVVGAGDVG (KRAS G13D)
TVVWADDVI

SEQ ID NO: 94077 - protein, 9 aa, synthetic construct
  source 1..9: note = Seed: VVVGAGDVG (KRAS G13D)
TVVWADDVL

SEQ ID NO: 94078 - protein, 9 aa, synthetic construct
  source 1..9: note = Seed: VVVGAGDVG (KRAS G13D)
TVVWADDVM

SEQ ID NO: 94079 - protein, 9 aa, synthetic construct
  source 1..9: note = Seed: VVVGAGDVG (KRAS G13D)
TVVWADDVV

SEQ ID NO: 94080 - protein, 9 aa, synthetic construct
  source 1..9: note = Seed: VVVGAGDVG (KRAS G13D)
TVVWAIDVA

SEQ ID NO: 94081 - protein, 9 aa, synthetic construct
  source 1..9: note = Seed: VVVGAGDVG (KRAS G13D)
TVVWAIDVI

SEQ ID NO: 94082 - protein, 9 aa, synthetic construct
  source 1..9: note = Seed: VVVGAGDVG (KRAS G13D)
TVVWAIDVL

SEQ ID NO: 94083 - protein, 9 aa, synthetic construct
  source 1..9: note = Seed: VVVGAGDVG (KRAS G13D)
TVVWAIDVM

SEQ ID NO: 94084 - protein, 9 aa, synthetic construct
  source 1..9: note = Seed: VVVGAGDVG (KRAS G13D)
TVVWAIDVS

SEQ ID NO: 94085 - protein, 9 aa, synthetic construct
  source 1..9: note = Seed: VVVGAGDVG (KRAS G13D)
TVVWAIDVV

SEQ ID NO: 94086 - protein, 9 aa, synthetic construct
  source 1..9: note = Seed: VVVGAGDVG (KRAS G13D)
TVVWALDVA

SEQ ID NO: 94087 - protein, 9 aa, synthetic construct
  source 1..9: note = Seed: VVVGAGDVG (KRAS G13D)
TVVWALDVI

SEQ ID NO: 94088 - protein, 9 aa, synthetic construct
  source 1..9: note = Seed: VVVGAGDVG (KRAS G13D)
TVVWALDVL

SEQ ID NO: 94089 - protein, 9 aa, synthetic construct
  source 1..9: note = Seed: VVVGAGDVG (KRAS G13D)
TVVWALDVM

SEQ ID NO: 94090 - protein, 9 aa, synthetic construct
  source 1..9: note = Seed: VVVGAGDVG (KRAS G13D)
TVVWALDVQ

SEQ ID NO: 94091 - protein, 9 aa, synthetic construct
  source 1..9: note = Seed: VVVGAGDVG (KRAS G13D)
TVVWALDVV

SEQ ID NO: 94092 - protein, 9 aa, synthetic construct
  source 1..9: note = Seed: VVVGAGDVG (KRAS G13D)
TVVWAMDVM

SEQ ID NO: 94093 - protein, 9 aa, synthetic construct
  source 1..9: note = Seed: VVVGAGDVG (KRAS G13D)
TVVWAMDVS

SEQ ID NO: 94094 - protein, 9 aa, synthetic construct
  source 1..9: note = Seed: VVVGAGDVG (KRAS G13D)
TVVWANDVA

SEQ ID NO: 94095 - protein, 9 aa, synthetic construct
  source 1..9: note = Seed: VVVGAGDVG (KRAS G13D)
TVVWANDVC

SEQ ID NO: 94096 - protein, 9 aa, synthetic construct
  source 1..9: note = Seed: VVVGAGDVG (KRAS G13D)
TVVWANDVG

SEQ ID NO: 94097 - protein, 9 aa, synthetic construct
  source 1..9: note = Seed: VVVGAGDVG (KRAS G13D)
TVVWANDVI

SEQ ID NO: 94098 - protein, 9 aa, synthetic construct
  source 1..9: note = Seed: VVVGAGDVG (KRAS G13D)
TVVWANDVL

SEQ ID NO: 94099 - protein, 9 aa, synthetic construct
  source 1..9: note = Seed: VVVGAGDVG (KRAS G13D)
TVVWANDVV

SEQ ID NO: 94100 - protein, 9 aa, synthetic construct
  source 1..9: note = Seed: VVVGAGDVG (KRAS G13D)
TVVWASDVA

SEQ ID NO: 94101 - protein, 9 aa, synthetic construct
  source 1..9: note = Seed: VVVGAGDVG (KRAS G13D)
TVVWASDVL

SEQ ID NO: 94102 - protein, 9 aa, synthetic construct
  source 1..9: note = Seed: VVVGAGDVG (KRAS G13D)
TVVWASDVM

SEQ ID NO: 94103 - protein, 9 aa, synthetic construct
  source 1..9: note = Seed: VVVGAGDVG (KRAS G13D)
TVVWASDVV

SEQ ID NO: 94104 - protein, 9 aa, synthetic construct
  source 1..9: note = Seed: VVVGAGDVG (KRAS G13D)
TVVWATDVI

SEQ ID NO: 94105 - protein, 9 aa, synthetic construct
  source 1..9: note = Seed: VVVGAGDVG (KRAS G13D)
TVVWATDVL

SEQ ID NO: 94106 - protein, 9 aa, synthetic construct
  source 1..9: note = Seed: VVVGAGDVG (KRAS G13D)
TVVWATDVV

SEQ ID NO: 94107 - protein, 9 aa, synthetic construct
  source 1..9: note = Seed: VVVGAGDVG (KRAS G13D)
TVVWAVDVA

SEQ ID NO: 94108 - protein, 9 aa, synthetic construct
  source 1..9: note = Seed: VVVGAGDVG (KRAS G13D)
TVVWAVDVI

SEQ ID NO: 94109 - protein, 9 aa, synthetic construct
  source 1..9: note = Seed: VVVGAGDVG (KRAS G13D)
TVVWAVDVL

SEQ ID NO: 94110 - protein, 9 aa, synthetic construct
  source 1..9: note = Seed: VVVGAGDVG (KRAS G13D)
TVVWAVDVM

SEQ ID NO: 94111 - protein, 9 aa, synthetic construct
  source 1..9: note = Seed: VVVGAGDVG (KRAS G13D)
TVVWAVDVV

SEQ ID NO: 94112 - protein, 9 aa, synthetic construct
  source 1..9: note = Seed: VVVGAGDVG (KRAS G13D)
TVVYAADVA

SEQ ID NO: 94113 - protein, 9 aa, synthetic construct
  source 1..9: note = Seed: VVVGAGDVG (KRAS G13D)
TVVYAADVI

SEQ ID NO: 94114 - protein, 9 aa, synthetic construct
  source 1..9: note = Seed: VVVGAGDVG (KRAS G13D)
TVVYAADVL

SEQ ID NO: 94115 - protein, 9 aa, synthetic construct
  source 1..9: note = Seed: VVVGAGDVG (KRAS G13D)
TVVYAADVM

SEQ ID NO: 94116 - protein, 9 aa, synthetic construct
  source 1..9: note = Seed: VVVGAGDVG (KRAS G13D)
TVVYAADVS

SEQ ID NO: 94117 - protein, 9 aa, synthetic construct
  source 1..9: note = Seed: VVVGAGDVG (KRAS G13D)
TVVYAADVV

SEQ ID NO: 94118 - protein, 9 aa, synthetic construct
  source 1..9: note = Seed: VVVGAGDVG (KRAS G13D)
TVVYAIDVI

SEQ ID NO: 94119 - protein, 9 aa, synthetic construct
  source 1..9: note = Seed: VVVGAGDVG (KRAS G13D)
TVVYAIDVL

SEQ ID NO: 94120 - protein, 9 aa, synthetic construct
  source 1..9: note = Seed: VVVGAGDVG (KRAS G13D)
TVVYAIDVM

SEQ ID NO: 94121 - protein, 9 aa, synthetic construct
  source 1..9: note = Seed: VVVGAGDVG (KRAS G13D)
TVVYAIDVS

SEQ ID NO: 94122 - protein, 9 aa, synthetic construct
  source 1..9: note = Seed: VVVGAGDVG (KRAS G13D)
TVVYAIDVV

SEQ ID NO: 94123 - protein, 9 aa, synthetic construct
  source 1..9: note = Seed: VVVGAGDVG (KRAS G13D)
TVVYALDVA

SEQ ID NO: 94124 - protein, 9 aa, synthetic construct
  source 1..9: note = Seed: VVVGAGDVG (KRAS G13D)
TVVYALDVF

SEQ ID NO: 94125 - protein, 9 aa, synthetic construct
  source 1..9: note = Seed: VVVGAGDVG (KRAS G13D)
TVVYALDVI

SEQ ID NO: 94126 - protein, 9 aa, synthetic construct
  source 1..9: note = Seed: VVVGAGDVG (KRAS G13D)
TVVYALDVL

SEQ ID NO: 94127 - protein, 9 aa, synthetic construct
  source 1..9: note = Seed: VVVGAGDVG (KRAS G13D)
TVVYALDVM

SEQ ID NO: 94128 - protein, 9 aa, synthetic construct
  source 1..9: note = Seed: VVVGAGDVG (KRAS G13D)
TVVYALDVQ

SEQ ID NO: 94129 - protein, 9 aa, synthetic construct
  source 1..9: note = Seed: VVVGAGDVG (KRAS G13D)
TVVYALDVR

SEQ ID NO: 94130 - protein, 9 aa, synthetic construct
  source 1..9: note = Seed: VVVGAGDVG (KRAS G13D)
TVVYALDVS

SEQ ID NO: 94131 - protein, 9 aa, synthetic construct
  source 1..9: note = Seed: VVVGAGDVG (KRAS G13D)
TVVYALDVV

SEQ ID NO: 94132 - protein, 9 aa, synthetic construct
  source 1..9: note = Seed: VVVGAGDVG (KRAS G13D)
TVVYALDVY

SEQ ID NO: 94133 - protein, 9 aa, synthetic construct
  source 1..9: note = Seed: VVVGAGDVG (KRAS G13D)
TVVYAMDVM

SEQ ID NO: 94134 - protein, 9 aa, synthetic construct
  source 1..9: note = Seed: VVVGAGDVG (KRAS G13D)
TVVYAMDVS

SEQ ID NO: 94135 - protein, 9 aa, synthetic construct
  source 1..9: note = Seed: VVVGAGDVG (KRAS G13D)
TVVYAMDVV

SEQ ID NO: 94136 - protein, 9 aa, synthetic construct
  source 1..9: note = Seed: VVVGAGDVG (KRAS G13D)
TVVYANDVA

SEQ ID NO: 94137 - protein, 9 aa, synthetic construct
  source 1..9: note = Seed: VVVGAGDVG (KRAS G13D)
TVVYANDVL

SEQ ID NO: 94138 - protein, 9 aa, synthetic construct
  source 1..9: note = Seed: VVVGAGDVG (KRAS G13D)
TVVYANDVV

SEQ ID NO: 94139 - protein, 9 aa, synthetic construct
  source 1..9: note = Seed: VVVGAGDVG (KRAS G13D)
TVVYAPDVI

SEQ ID NO: 94140 - protein, 9 aa, synthetic construct
  source 1..9: note = Seed: VVVGAGDVG (KRAS G13D)
TVVYAPDVL

SEQ ID NO: 94141 - protein, 9 aa, synthetic construct
  source 1..9: note = Seed: VVVGAGDVG (KRAS G13D)
TVVYAPDVV

SEQ ID NO: 94142 - protein, 9 aa, synthetic construct
  source 1..9: note = Seed: VVVGAGDVG (KRAS G13D)
TVVYASDVA

SEQ ID NO: 94143 - protein, 9 aa, synthetic construct
  source 1..9: note = Seed: VVVGAGDVG (KRAS G13D)
TVVYASDVI

SEQ ID NO: 94144 - protein, 9 aa, synthetic construct
  source 1..9: note = Seed: VVVGAGDVG (KRAS G13D)
TVVYASDVL

SEQ ID NO: 94145 - protein, 9 aa, synthetic construct
  source 1..9: note = Seed: VVVGAGDVG (KRAS G13D)
TVVYASDVM

SEQ ID NO: 94146 - protein, 9 aa, synthetic construct
  source 1..9: note = Seed: VVVGAGDVG (KRAS G13D)
TVVYASDVV

SEQ ID NO: 94147 - protein, 9 aa, synthetic construct
  source 1..9: note = Seed: VVVGAGDVG (KRAS G13D)
TVVYAVDVA

SEQ ID NO: 94148 - protein, 9 aa, synthetic construct
  source 1..9: note = Seed: VVVGAGDVG (KRAS G13D)
TVVYAVDVI

SEQ ID NO: 94149 - protein, 9 aa, synthetic construct
  source 1..9: note = Seed: VVVGAGDVG (KRAS G13D)
TVVYAVDVL

SEQ ID NO: 94150 - protein, 9 aa, synthetic construct
  source 1..9: note = Seed: VVVGAGDVG (KRAS G13D)
TVVYAVDVM

SEQ ID NO: 94151 - protein, 9 aa, synthetic construct
  source 1..9: note = Seed: VVVGAGDVG (KRAS G13D)
TVVYAVDVV

SEQ ID NO: 94152 - protein, 9 aa, synthetic construct
  source 1..9: note = Seed: VVVGAGDVG (KRAS G13D)
VVVAAADVA

SEQ ID NO: 94153 - protein, 9 aa, synthetic construct
  source 1..9: note = Seed: VVVGAGDVG (KRAS G13D)
VVVAAADVD

SEQ ID NO: 94154 - protein, 9 aa, synthetic construct
  source 1..9: note = Seed: VVVGAGDVG (KRAS G13D)
VVVAAADVE

SEQ ID NO: 94155 - protein, 9 aa, synthetic construct
  source 1..9: note = Seed: VVVGAGDVG (KRAS G13D)
VVVAAADVG

SEQ ID NO: 94156 - protein, 9 aa, synthetic construct
  source 1..9: note = Seed: VVVGAGDVG (KRAS G13D)
VVVAAADVH

SEQ ID NO: 94157 - protein, 9 aa, synthetic construct
  source 1..9: note = Seed: VVVGAGDVG (KRAS G13D)
VVVAAADVI

SEQ ID NO: 94158 - protein, 9 aa, synthetic construct
  source 1..9: note = Seed: VVVGAGDVG (KRAS G13D)
VVVAAADVL

SEQ ID NO: 94159 - protein, 9 aa, synthetic construct
  source 1..9: note = Seed: VVVGAGDVG (KRAS G13D)
VVVAAADVM

SEQ ID NO: 94160 - protein, 9 aa, synthetic construct
  source 1..9: note = Seed: VVVGAGDVG (KRAS G13D)
VVVAAADVN

SEQ ID NO: 94161 - protein, 9 aa, synthetic construct
  source 1..9: note = Seed: VVVGAGDVG (KRAS G13D)
VVVAAADVQ

SEQ ID NO: 94162 - protein, 9 aa, synthetic construct
  source 1..9: note = Seed: VVVGAGDVG (KRAS G13D)
VVVAAADVS

SEQ ID NO: 94163 - protein, 9 aa, synthetic construct
  source 1..9: note = Seed: VVVGAGDVG (KRAS G13D)
VVVAAADVT

SEQ ID NO: 94164 - protein, 9 aa, synthetic construct
  source 1..9: note = Seed: VVVGAGDVG (KRAS G13D)
VVVAAADVV

SEQ ID NO: 94165 - protein, 9 aa, synthetic construct
  source 1..9: note = Seed: VVVGAGDVG (KRAS G13D)
VVVAAGDVA

SEQ ID NO: 94166 - protein, 9 aa, synthetic construct
  source 1..9: note = Seed: VVVGAGDVG (KRAS G13D)
VVVAAGDVN

SEQ ID NO: 94167 - protein, 9 aa, synthetic construct
  source 1..9: note = Seed: VVVGAGDVG (KRAS G13D)
VVVAAGDVS

SEQ ID NO: 94168 - protein, 9 aa, synthetic construct
  source 1..9: note = Seed: VVVGAGDVG (KRAS G13D)
VVVAAIDVA

SEQ ID NO: 94169 - protein, 9 aa, synthetic construct
  source 1..9: note = Seed: VVVGAGDVG (KRAS G13D)
VVVAAIDVS

SEQ ID NO: 94170 - protein, 9 aa, synthetic construct
  source 1..9: note = Seed: VVVGAGDVG (KRAS G13D)
VVVAANDVA

SEQ ID NO: 94171 - protein, 9 aa, synthetic construct
  source 1..9: note = Seed: VVVGAGDVG (KRAS G13D)
VVVAANDVC

SEQ ID NO: 94172 - protein, 9 aa, synthetic construct
  source 1..9: note = Seed: VVVGAGDVG (KRAS G13D)
VVVAANDVG

SEQ ID NO: 94173 - protein, 9 aa, synthetic construct
  source 1..9: note = Seed: VVVGAGDVG (KRAS G13D)
VVVAANDVH

SEQ ID NO: 94174 - protein, 9 aa, synthetic construct
  source 1..9: note = Seed: VVVGAGDVG (KRAS G13D)
VVVAANDVI

SEQ ID NO: 94175 - protein, 9 aa, synthetic construct
  source 1..9: note = Seed: VVVGAGDVG (KRAS G13D)
VVVAANDVL

SEQ ID NO: 94176 - protein, 9 aa, synthetic construct
  source 1..9: note = Seed: VVVGAGDVG (KRAS G13D)
VVVAANDVM

SEQ ID NO: 94177 - protein, 9 aa, synthetic construct
  source 1..9: note = Seed: VVVGAGDVG (KRAS G13D)
VVVAANDVN

SEQ ID NO: 94178 - protein, 9 aa, synthetic construct
  source 1..9: note = Seed: VVVGAGDVG (KRAS G13D)
VVVAANDVQ

SEQ ID NO: 94179 - protein, 9 aa, synthetic construct
  source 1..9: note = Seed: VVVGAGDVG (KRAS G13D)
VVVAANDVS

SEQ ID NO: 94180 - protein, 9 aa, synthetic construct
  source 1..9: note = Seed: VVVGAGDVG (KRAS G13D)
VVVAANDVT

SEQ ID NO: 94181 - protein, 9 aa, synthetic construct
  source 1..9: note = Seed: VVVGAGDVG (KRAS G13D)
VVVAANDVV

SEQ ID NO: 94182 - protein, 9 aa, synthetic construct
  source 1..9: note = Seed: VVVGAGDVG (KRAS G13D)
VVVAANDVY

SEQ ID NO: 94183 - protein, 9 aa, synthetic construct
  source 1..9: note = Seed: VVVGAGDVG (KRAS G13D)
VVVAAPDVA

SEQ ID NO: 94184 - protein, 9 aa, synthetic construct
  source 1..9: note = Seed: VVVGAGDVG (KRAS G13D)
VVVAAPDVH

SEQ ID NO: 94185 - protein, 9 aa, synthetic construct
  source 1..9: note = Seed: VVVGAGDVG (KRAS G13D)
VVVAAPDVI

SEQ ID NO: 94186 - protein, 9 aa, synthetic construct
  source 1..9: note = Seed: VVVGAGDVG (KRAS G13D)
VVVAAPDVL

SEQ ID NO: 94187 - protein, 9 aa, synthetic construct
  source 1..9: note = Seed: VVVGAGDVG (KRAS G13D)
VVVAAPDVM

SEQ ID NO: 94188 - protein, 9 aa, synthetic construct
  source 1..9: note = Seed: VVVGAGDVG (KRAS G13D)
VVVAAPDVN

SEQ ID NO: 94189 - protein, 9 aa, synthetic construct
  source 1..9: note = Seed: VVVGAGDVG (KRAS G13D)
VVVAAPDVQ

SEQ ID NO: 94190 - protein, 9 aa, synthetic construct
  source 1..9: note = Seed: VVVGAGDVG (KRAS G13D)
VVVAAPDVS

SEQ ID NO: 94191 - protein, 9 aa, synthetic construct
  source 1..9: note = Seed: VVVGAGDVG (KRAS G13D)
VVVAAPDVT

SEQ ID NO: 94192 - protein, 9 aa, synthetic construct
  source 1..9: note = Seed: VVVGAGDVG (KRAS G13D)
VVVAAPDVV

SEQ ID NO: 94193 - protein, 9 aa, synthetic construct
  source 1..9: note = Seed: VVVGAGDVG (KRAS G13D)
VVVAASDVA

SEQ ID NO: 94194 - protein, 9 aa, synthetic construct
  source 1..9: note = Seed: VVVGAGDVG (KRAS G13D)
VVVAASDVD

SEQ ID NO: 94195 - protein, 9 aa, synthetic construct
  source 1..9: note = Seed: VVVGAGDVG (KRAS G13D)
VVVAASDVG

SEQ ID NO: 94196 - protein, 9 aa, synthetic construct
  source 1..9: note = Seed: VVVGAGDVG (KRAS G13D)
VVVAASDVH

SEQ ID NO: 94197 - protein, 9 aa, synthetic construct
  source 1..9: note = Seed: VVVGAGDVG (KRAS G13D)
VVVAASDVI

SEQ ID NO: 94198 - protein, 9 aa, synthetic construct
  source 1..9: note = Seed: VVVGAGDVG (KRAS G13D)
VVVAASDVL

SEQ ID NO: 94199 - protein, 9 aa, synthetic construct
  source 1..9: note = Seed: VVVGAGDVG (KRAS G13D)
VVVAASDVM

SEQ ID NO: 94200 - protein, 9 aa, synthetic construct
  source 1..9: note = Seed: VVVGAGDVG (KRAS G13D)
VVVAASDVN

SEQ ID NO: 94201 - protein, 9 aa, synthetic construct
  source 1..9: note = Seed: VVVGAGDVG (KRAS G13D)
VVVAASDVQ

SEQ ID NO: 94202 - protein, 9 aa, synthetic construct
  source 1..9: note = Seed: VVVGAGDVG (KRAS G13D)
VVVAASDVS

SEQ ID NO: 94203 - protein, 9 aa, synthetic construct
  source 1..9: note = Seed: VVVGAGDVG (KRAS G13D)
VVVAASDVT

SEQ ID NO: 94204 - protein, 9 aa, synthetic construct
  source 1..9: note = Seed: VVVGAGDVG (KRAS G13D)
VVVAASDVV

SEQ ID NO: 94205 - protein, 9 aa, synthetic construct
  source 1..9: note = Seed: VVVGAGDVG (KRAS G13D)
VVVAATDVA

SEQ ID NO: 94206 - protein, 9 aa, synthetic construct
  source 1..9: note = Seed: VVVGAGDVG (KRAS G13D)
VVVAATDVG

SEQ ID NO: 94207 - protein, 9 aa, synthetic construct
  source 1..9: note = Seed: VVVGAGDVG (KRAS G13D)
VVVAATDVH

SEQ ID NO: 94208 - protein, 9 aa, synthetic construct
  source 1..9: note = Seed: VVVGAGDVG (KRAS G13D)
VVVAATDVI

SEQ ID NO: 94209 - protein, 9 aa, synthetic construct
  source 1..9: note = Seed: VVVGAGDVG (KRAS G13D)
VVVAATDVL

SEQ ID NO: 94210 - protein, 9 aa, synthetic construct
  source 1..9: note = Seed: VVVGAGDVG (KRAS G13D)
VVVAATDVM

SEQ ID NO: 94211 - protein, 9 aa, synthetic construct
  source 1..9: note = Seed: VVVGAGDVG (KRAS G13D)
VVVAATDVN

SEQ ID NO: 94212 - protein, 9 aa, synthetic construct
  source 1..9: note = Seed: VVVGAGDVG (KRAS G13D)
VVVAATDVQ

SEQ ID NO: 94213 - protein, 9 aa, synthetic construct
  source 1..9: note = Seed: VVVGAGDVG (KRAS G13D)
VVVAATDVS

SEQ ID NO: 94214 - protein, 9 aa, synthetic construct
  source 1..9: note = Seed: VVVGAGDVG (KRAS G13D)
VVVAATDVT

SEQ ID NO: 94215 - protein, 9 aa, synthetic construct
  source 1..9: note = Seed: VVVGAGDVG (KRAS G13D)
VVVAATDVV

SEQ ID NO: 94216 - protein, 9 aa, synthetic construct
  source 1..9: note = Seed: VVVGAGDVG (KRAS G13D)
VVVAAVDVA

SEQ ID NO: 94217 - protein, 9 aa, synthetic construct
  source 1..9: note = Seed: VVVGAGDVG (KRAS G13D)
VVVAAVDVH

SEQ ID NO: 94218 - protein, 9 aa, synthetic construct
  source 1..9: note = Seed: VVVGAGDVG (KRAS G13D)
VVVAAVDVN

SEQ ID NO: 94219 - protein, 9 aa, synthetic construct
  source 1..9: note = Seed: VVVGAGDVG (KRAS G13D)
VVVAAVDVQ

SEQ ID NO: 94220 - protein, 9 aa, synthetic construct
  source 1..9: note = Seed: VVVGAGDVG (KRAS G13D)
VVVAAVDVS

SEQ ID NO: 94221 - protein, 9 aa, synthetic construct
  source 1..9: note = Seed: VVVGAGDVG (KRAS G13D)
VVVCAADVA

SEQ ID NO: 94222 - protein, 9 aa, synthetic construct
  source 1..9: note = Seed: VVVGAGDVG (KRAS G13D)
VVVCALDVA

SEQ ID NO: 94223 - protein, 9 aa, synthetic construct
  source 1..9: note = Seed: VVVGAGDVG (KRAS G13D)
VVVCANDVA

SEQ ID NO: 94224 - protein, 9 aa, synthetic construct
  source 1..9: note = Seed: VVVGAGDVG (KRAS G13D)
VVVCANDVS

SEQ ID NO: 94225 - protein, 9 aa, synthetic construct
  source 1..9: note = Seed: VVVGAGDVG (KRAS G13D)
VVVDAADVA

SEQ ID NO: 94226 - protein, 9 aa, synthetic construct
  source 1..9: note = Seed: VVVGAGDVG (KRAS G13D)
VVVEAADVA

SEQ ID NO: 94227 - protein, 9 aa, synthetic construct
  source 1..9: note = Seed: VVVGAGDVG (KRAS G13D)
VVVEAADVE

SEQ ID NO: 94228 - protein, 9 aa, synthetic construct
  source 1..9: note = Seed: VVVGAGDVG (KRAS G13D)
VVVEAADVH

SEQ ID NO: 94229 - protein, 9 aa, synthetic construct
  source 1..9: note = Seed: VVVGAGDVG (KRAS G13D)
VVVEAADVI

SEQ ID NO: 94230 - protein, 9 aa, synthetic construct
  source 1..9: note = Seed: VVVGAGDVG (KRAS G13D)
VVVEAADVM

SEQ ID NO: 94231 - protein, 9 aa, synthetic construct
  source 1..9: note = Seed: VVVGAGDVG (KRAS G13D)
VVVEAADVN

SEQ ID NO: 94232 - protein, 9 aa, synthetic construct
  source 1..9: note = Seed: VVVGAGDVG (KRAS G13D)
VVVEAADVQ

SEQ ID NO: 94233 - protein, 9 aa, synthetic construct
  source 1..9: note = Seed: VVVGAGDVG (KRAS G13D)
VVVEAADVS

SEQ ID NO: 94234 - protein, 9 aa, synthetic construct
  source 1..9: note = Seed: VVVGAGDVG (KRAS G13D)
VVVEAADVT

SEQ ID NO: 94235 - protein, 9 aa, synthetic construct
  source 1..9: note = Seed: VVVGAGDVG (KRAS G13D)
VVVEAADVV

SEQ ID NO: 94236 - protein, 9 aa, synthetic construct
  source 1..9: note = Seed: VVVGAGDVG (KRAS G13D)
VVVEASDVA

SEQ ID NO: 94237 - protein, 9 aa, synthetic construct
  source 1..9: note = Seed: VVVGAGDVG (KRAS G13D)
VVVEASDVQ

SEQ ID NO: 94238 - protein, 9 aa, synthetic construct
  source 1..9: note = Seed: VVVGAGDVG (KRAS G13D)
VVVEASDVS

SEQ ID NO: 94239 - protein, 9 aa, synthetic construct
  source 1..9: note = Seed: VVVGAGDVG (KRAS G13D)
VVVEASDVV

SEQ ID NO: 94240 - protein, 9 aa, synthetic construct
  source 1..9: note = Seed: VVVGAGDVG (KRAS G13D)
VVVEAVDVA

SEQ ID NO: 94241 - protein, 9 aa, synthetic construct
  source 1..9: note = Seed: VVVGAGDVG (KRAS G13D)
VVVFAADVA

SEQ ID NO: 94242 - protein, 9 aa, synthetic construct
  source 1..9: note = Seed: VVVGAGDVG (KRAS G13D)
VVVFAADVF

SEQ ID NO: 94243 - protein, 9 aa, synthetic construct
  source 1..9: note = Seed: VVVGAGDVG (KRAS G13D)
VVVFAADVG

SEQ ID NO: 94244 - protein, 9 aa, synthetic construct
  source 1..9: note = Seed: VVVGAGDVG (KRAS G13D)
VVVFAADVI

SEQ ID NO: 94245 - protein, 9 aa, synthetic construct
  source 1..9: note = Seed: VVVGAGDVG (KRAS G13D)
VVVFAADVL

SEQ ID NO: 94246 - protein, 9 aa, synthetic construct
  source 1..9: note = Seed: VVVGAGDVG (KRAS G13D)
VVVFAADVM

SEQ ID NO: 94247 - protein, 9 aa, synthetic construct
  source 1..9: note = Seed: VVVGAGDVG (KRAS G13D)
VVVFAADVN

SEQ ID NO: 94248 - protein, 9 aa, synthetic construct
  source 1..9: note = Seed: VVVGAGDVG (KRAS G13D)
VVVFAADVS

SEQ ID NO: 94249 - protein, 9 aa, synthetic construct
  source 1..9: note = Seed: VVVGAGDVG (KRAS G13D)
VVVFAADVT

SEQ ID NO: 94250 - protein, 9 aa, synthetic construct
  source 1..9: note = Seed: VVVGAGDVG (KRAS G13D)
VVVFAADVV

SEQ ID NO: 94251 - protein, 9 aa, synthetic construct
  source 1..9: note = Seed: VVVGAGDVG (KRAS G13D)
VVVFAADVY

SEQ ID NO: 94252 - protein, 9 aa, synthetic construct
  source 1..9: note = Seed: VVVGAGDVG (KRAS G13D)
VVVFADDVA

SEQ ID NO: 94253 - protein, 9 aa, synthetic construct
  source 1..9: note = Seed: VVVGAGDVG (KRAS G13D)
VVVFADDVC

SEQ ID NO: 94254 - protein, 9 aa, synthetic construct
  source 1..9: note = Seed: VVVGAGDVG (KRAS G13D)
VVVFADDVE

SEQ ID NO: 94255 - protein, 9 aa, synthetic construct
  source 1..9: note = Seed: VVVGAGDVG (KRAS G13D)
VVVFADDVF

SEQ ID NO: 94256 - protein, 9 aa, synthetic construct
  source 1..9: note = Seed: VVVGAGDVG (KRAS G13D)
VVVFADDVG

SEQ ID NO: 94257 - protein, 9 aa, synthetic construct
  source 1..9: note = Seed: VVVGAGDVG (KRAS G13D)
VVVFADDVH

SEQ ID NO: 94258 - protein, 9 aa, synthetic construct
  source 1..9: note = Seed: VVVGAGDVG (KRAS G13D)
VVVFADDVI

SEQ ID NO: 94259 - protein, 9 aa, synthetic construct
  source 1..9: note = Seed: VVVGAGDVG (KRAS G13D)
VVVFADDVL

SEQ ID NO: 94260 - protein, 9 aa, synthetic construct
  source 1..9: note = Seed: VVVGAGDVG (KRAS G13D)
VVVFADDVM

SEQ ID NO: 94261 - protein, 9 aa, synthetic construct
  source 1..9: note = Seed: VVVGAGDVG (KRAS G13D)
VVVFADDVN

SEQ ID NO: 94262 - protein, 9 aa, synthetic construct
  source 1..9: note = Seed: VVVGAGDVG (KRAS G13D)
VVVFADDVP

SEQ ID NO: 94263 - protein, 9 aa, synthetic construct
  source 1..9: note = Seed: VVVGAGDVG (KRAS G13D)
VVVFADDVQ

SEQ ID NO: 94264 - protein, 9 aa, synthetic construct
  source 1..9: note = Seed: VVVGAGDVG (KRAS G13D)
VVVFADDVS

SEQ ID NO: 94265 - protein, 9 aa, synthetic construct
  source 1..9: note = Seed: VVVGAGDVG (KRAS G13D)
VVVFADDVT

SEQ ID NO: 94266 - protein, 9 aa, synthetic construct
  source 1..9: note = Seed: VVVGAGDVG (KRAS G13D)
VVVFADDVV

SEQ ID NO: 94267 - protein, 9 aa, synthetic construct
  source 1..9: note = Seed: VVVGAGDVG (KRAS G13D)
VVVFADDVY

SEQ ID NO: 94268 - protein, 9 aa, synthetic construct
  source 1..9: note = Seed: VVVGAGDVG (KRAS G13D)
VVVFAEDVA

SEQ ID NO: 94269 - protein, 9 aa, synthetic construct
  source 1..9: note = Seed: VVVGAGDVG (KRAS G13D)
VVVFAGDVA

SEQ ID NO: 94270 - protein, 9 aa, synthetic construct
  source 1..9: note = Seed: VVVGAGDVG (KRAS G13D)
VVVFAHDVL

SEQ ID NO: 94271 - protein, 9 aa, synthetic construct
  source 1..9: note = Seed: VVVGAGDVG (KRAS G13D)
VVVFAHDVM

SEQ ID NO: 94272 - protein, 9 aa, synthetic construct
  source 1..9: note = Seed: VVVGAGDVG (KRAS G13D)
VVVFAIDVA

SEQ ID NO: 94273 - protein, 9 aa, synthetic construct
  source 1..9: note = Seed: VVVGAGDVG (KRAS G13D)
VVVFAIDVS

SEQ ID NO: 94274 - protein, 9 aa, synthetic construct
  source 1..9: note = Seed: VVVGAGDVG (KRAS G13D)
VVVFAIDVY

SEQ ID NO: 94275 - protein, 9 aa, synthetic construct
  source 1..9: note = Seed: VVVGAGDVG (KRAS G13D)
VVVFALDVA

SEQ ID NO: 94276 - protein, 9 aa, synthetic construct
  source 1..9: note = Seed: VVVGAGDVG (KRAS G13D)
VVVFAMDVA

SEQ ID NO: 94277 - protein, 9 aa, synthetic construct
  source 1..9: note = Seed: VVVGAGDVG (KRAS G13D)
VVVFAMDVM

SEQ ID NO: 94278 - protein, 9 aa, synthetic construct
  source 1..9: note = Seed: VVVGAGDVG (KRAS G13D)
VVVFAMDVY

SEQ ID NO: 94279 - protein, 9 aa, synthetic construct
  source 1..9: note = Seed: VVVGAGDVG (KRAS G13D)
VVVFANDVA

SEQ ID NO: 94280 - protein, 9 aa, synthetic construct
  source 1..9: note = Seed: VVVGAGDVG (KRAS G13D)
VVVFANDVC

SEQ ID NO: 94281 - protein, 9 aa, synthetic construct
  source 1..9: note = Seed: VVVGAGDVG (KRAS G13D)
VVVFANDVD

SEQ ID NO: 94282 - protein, 9 aa, synthetic construct
  source 1..9: note = Seed: VVVGAGDVG (KRAS G13D)
VVVFANDVE

SEQ ID NO: 94283 - protein, 9 aa, synthetic construct
  source 1..9: note = Seed: VVVGAGDVG (KRAS G13D)
VVVFANDVF

SEQ ID NO: 94284 - protein, 9 aa, synthetic construct
  source 1..9: note = Seed: VVVGAGDVG (KRAS G13D)
VVVFANDVG

SEQ ID NO: 94285 - protein, 9 aa, synthetic construct
  source 1..9: note = Seed: VVVGAGDVG (KRAS G13D)
VVVFANDVH

SEQ ID NO: 94286 - protein, 9 aa, synthetic construct
  source 1..9: note = Seed: VVVGAGDVG (KRAS G13D)
VVVFANDVI

SEQ ID NO: 94287 - protein, 9 aa, synthetic construct
  source 1..9: note = Seed: VVVGAGDVG (KRAS G13D)
VVVFANDVK

SEQ ID NO: 94288 - protein, 9 aa, synthetic construct
  source 1..9: note = Seed: VVVGAGDVG (KRAS G13D)
VVVFANDVL

SEQ ID NO: 94289 - protein, 9 aa, synthetic construct
  source 1..9: note = Seed: VVVGAGDVG (KRAS G13D)
VVVFANDVM

SEQ ID NO: 94290 - protein, 9 aa, synthetic construct
  source 1..9: note = Seed: VVVGAGDVG (KRAS G13D)
VVVFANDVN

SEQ ID NO: 94291 - protein, 9 aa, synthetic construct
  source 1..9: note = Seed: VVVGAGDVG (KRAS G13D)
VVVFANDVP

SEQ ID NO: 94292 - protein, 9 aa, synthetic construct
  source 1..9: note = Seed: VVVGAGDVG (KRAS G13D)
VVVFANDVQ

SEQ ID NO: 94293 - protein, 9 aa, synthetic construct
  source 1..9: note = Seed: VVVGAGDVG (KRAS G13D)
VVVFANDVR

SEQ ID NO: 94294 - protein, 9 aa, synthetic construct
  source 1..9: note = Seed: VVVGAGDVG (KRAS G13D)
VVVFANDVS

SEQ ID NO: 94295 - protein, 9 aa, synthetic construct
  source 1..9: note = Seed: VVVGAGDVG (KRAS G13D)
VVVFANDVT

SEQ ID NO: 94296 - protein, 9 aa, synthetic construct
  source 1..9: note = Seed: VVVGAGDVG (KRAS G13D)
VVVFANDVV

SEQ ID NO: 94297 - protein, 9 aa, synthetic construct
  source 1..9: note = Seed: VVVGAGDVG (KRAS G13D)
VVVFANDVW

SEQ ID NO: 94298 - protein, 9 aa, synthetic construct
  source 1..9: note = Seed: VVVGAGDVG (KRAS G13D)
VVVFANDVY

SEQ ID NO: 94299 - protein, 9 aa, synthetic construct
  source 1..9: note = Seed: VVVGAGDVG (KRAS G13D)
VVVFAPDVA

SEQ ID NO: 94300 - protein, 9 aa, synthetic construct
  source 1..9: note = Seed: VVVGAGDVG (KRAS G13D)
VVVFAPDVF

SEQ ID NO: 94301 - protein, 9 aa, synthetic construct
  source 1..9: note = Seed: VVVGAGDVG (KRAS G13D)
VVVFAPDVH

SEQ ID NO: 94302 - protein, 9 aa, synthetic construct
  source 1..9: note = Seed: VVVGAGDVG (KRAS G13D)
VVVFAPDVI

SEQ ID NO: 94303 - protein, 9 aa, synthetic construct
  source 1..9: note = Seed: VVVGAGDVG (KRAS G13D)
VVVFAPDVL

SEQ ID NO: 94304 - protein, 9 aa, synthetic construct
  source 1..9: note = Seed: VVVGAGDVG (KRAS G13D)
VVVFAPDVM

SEQ ID NO: 94305 - protein, 9 aa, synthetic construct
  source 1..9: note = Seed: VVVGAGDVG (KRAS G13D)
VVVFAPDVN

SEQ ID NO: 94306 - protein, 9 aa, synthetic construct
  source 1..9: note = Seed: VVVGAGDVG (KRAS G13D)
VVVFAPDVQ

SEQ ID NO: 94307 - protein, 9 aa, synthetic construct
  source 1..9: note = Seed: VVVGAGDVG (KRAS G13D)
VVVFAPDVS

SEQ ID NO: 94308 - protein, 9 aa, synthetic construct
  source 1..9: note = Seed: VVVGAGDVG (KRAS G13D)
VVVFAPDVT

SEQ ID NO: 94309 - protein, 9 aa, synthetic construct
  source 1..9: note = Seed: VVVGAGDVG (KRAS G13D)
VVVFAPDVV

SEQ ID NO: 94310 - protein, 9 aa, synthetic construct
  source 1..9: note = Seed: VVVGAGDVG (KRAS G13D)
VVVFAPDVY

SEQ ID NO: 94311 - protein, 9 aa, synthetic construct
  source 1..9: note = Seed: VVVGAGDVG (KRAS G13D)
VVVFAQDVA

SEQ ID NO: 94312 - protein, 9 aa, synthetic construct
  source 1..9: note = Seed: VVVGAGDVG (KRAS G13D)
VVVFAQDVI

SEQ ID NO: 94313 - protein, 9 aa, synthetic construct
  source 1..9: note = Seed: VVVGAGDVG (KRAS G13D)
VVVFAQDVL

SEQ ID NO: 94314 - protein, 9 aa, synthetic construct
  source 1..9: note = Seed: VVVGAGDVG (KRAS G13D)
VVVFAQDVM

SEQ ID NO: 94315 - protein, 9 aa, synthetic construct
  source 1..9: note = Seed: VVVGAGDVG (KRAS G13D)
VVVFAQDVV

SEQ ID NO: 94316 - protein, 9 aa, synthetic construct
  source 1..9: note = Seed: VVVGAGDVG (KRAS G13D)
VVVFASDVA

SEQ ID NO: 94317 - protein, 9 aa, synthetic construct
  source 1..9: note = Seed: VVVGAGDVG (KRAS G13D)
VVVFASDVF

SEQ ID NO: 94318 - protein, 9 aa, synthetic construct
  source 1..9: note = Seed: VVVGAGDVG (KRAS G13D)
VVVFASDVG

SEQ ID NO: 94319 - protein, 9 aa, synthetic construct
  source 1..9: note = Seed: VVVGAGDVG (KRAS G13D)
VVVFASDVH

SEQ ID NO: 94320 - protein, 9 aa, synthetic construct
  source 1..9: note = Seed: VVVGAGDVG (KRAS G13D)
VVVFASDVI

SEQ ID NO: 94321 - protein, 9 aa, synthetic construct
  source 1..9: note = Seed: VVVGAGDVG (KRAS G13D)
VVVFASDVL

SEQ ID NO: 94322 - protein, 9 aa, synthetic construct
  source 1..9: note = Seed: VVVGAGDVG (KRAS G13D)
VVVFASDVM

SEQ ID NO: 94323 - protein, 9 aa, synthetic construct
  source 1..9: note = Seed: VVVGAGDVG (KRAS G13D)
VVVFASDVN

SEQ ID NO: 94324 - protein, 9 aa, synthetic construct
  source 1..9: note = Seed: VVVGAGDVG (KRAS G13D)
VVVFASDVQ

SEQ ID NO: 94325 - protein, 9 aa, synthetic construct
  source 1..9: note = Seed: VVVGAGDVG (KRAS G13D)
VVVFASDVS

SEQ ID NO: 94326 - protein, 9 aa, synthetic construct
  source 1..9: note = Seed: VVVGAGDVG (KRAS G13D)
VVVFASDVT

SEQ ID NO: 94327 - protein, 9 aa, synthetic construct
  source 1..9: note = Seed: VVVGAGDVG (KRAS G13D)
VVVFASDVV

SEQ ID NO: 94328 - protein, 9 aa, synthetic construct
  source 1..9: note = Seed: VVVGAGDVG (KRAS G13D)
VVVFASDVY

SEQ ID NO: 94329 - protein, 9 aa, synthetic construct
  source 1..9: note = Seed: VVVGAGDVG (KRAS G13D)
VVVFATDVA

SEQ ID NO: 94330 - protein, 9 aa, synthetic construct
  source 1..9: note = Seed: VVVGAGDVG (KRAS G13D)
VVVFATDVG

SEQ ID NO: 94331 - protein, 9 aa, synthetic construct
  source 1..9: note = Seed: VVVGAGDVG (KRAS G13D)
VVVFATDVH

SEQ ID NO: 94332 - protein, 9 aa, synthetic construct
  source 1..9: note = Seed: VVVGAGDVG (KRAS G13D)
VVVFATDVI

SEQ ID NO: 94333 - protein, 9 aa, synthetic construct
  source 1..9: note = Seed: VVVGAGDVG (KRAS G13D)
VVVFATDVL

SEQ ID NO: 94334 - protein, 9 aa, synthetic construct
  source 1..9: note = Seed: VVVGAGDVG (KRAS G13D)
VVVFATDVM

SEQ ID NO: 94335 - protein, 9 aa, synthetic construct
  source 1..9: note = Seed: VVVGAGDVG (KRAS G13D)
VVVFATDVN

SEQ ID NO: 94336 - protein, 9 aa, synthetic construct
  source 1..9: note = Seed: VVVGAGDVG (KRAS G13D)
VVVFATDVQ

SEQ ID NO: 94337 - protein, 9 aa, synthetic construct
  source 1..9: note = Seed: VVVGAGDVG (KRAS G13D)
VVVFATDVS

SEQ ID NO: 94338 - protein, 9 aa, synthetic construct
  source 1..9: note = Seed: VVVGAGDVG (KRAS G13D)
VVVFATDVT

SEQ ID NO: 94339 - protein, 9 aa, synthetic construct
  source 1..9: note = Seed: VVVGAGDVG (KRAS G13D)
VVVFATDVV

SEQ ID NO: 94340 - protein, 9 aa, synthetic construct
  source 1..9: note = Seed: VVVGAGDVG (KRAS G13D)
VVVFAVDVA

SEQ ID NO: 94341 - protein, 9 aa, synthetic construct
  source 1..9: note = Seed: VVVGAGDVG (KRAS G13D)
VVVGAADVA

SEQ ID NO: 94342 - protein, 9 aa, synthetic construct
  source 1..9: note = Seed: VVVGAGDVG (KRAS G13D)
VVVGAADVI

SEQ ID NO: 94343 - protein, 9 aa, synthetic construct
  source 1..9: note = Seed: VVVGAGDVG (KRAS G13D)
VVVGAADVL

SEQ ID NO: 94344 - protein, 9 aa, synthetic construct
  source 1..9: note = Seed: VVVGAGDVG (KRAS G13D)
VVVGAADVN

SEQ ID NO: 94345 - protein, 9 aa, synthetic construct
  source 1..9: note = Seed: VVVGAGDVG (KRAS G13D)
VVVGAADVS

SEQ ID NO: 94346 - protein, 9 aa, synthetic construct
  source 1..9: note = Seed: VVVGAGDVG (KRAS G13D)
VVVGAADVT

SEQ ID NO: 94347 - protein, 9 aa, synthetic construct
  source 1..9: note = Seed: VVVGAGDVG (KRAS G13D)
VVVGAADVV

SEQ ID NO: 94348 - protein, 9 aa, synthetic construct
  source 1..9: note = Seed: VVVGAGDVG (KRAS G13D)
VVVGASDVA

SEQ ID NO: 94349 - protein, 9 aa, synthetic construct
  source 1..9: note = Seed: VVVGAGDVG (KRAS G13D)
VVVHAADVI

SEQ ID NO: 94350 - protein, 9 aa, synthetic construct
  source 1..9: note = Seed: VVVGAGDVG (KRAS G13D)
VVVHAADVL

SEQ ID NO: 94351 - protein, 9 aa, synthetic construct
  source 1..9: note = Seed: VVVGAGDVG (KRAS G13D)
VVVHAADVM

SEQ ID NO: 94352 - protein, 9 aa, synthetic construct
  source 1..9: note = Seed: VVVGAGDVG (KRAS G13D)
VVVHAADVV

SEQ ID NO: 94353 - protein, 9 aa, synthetic construct
  source 1..9: note = Seed: VVVGAGDVG (KRAS G13D)
VVVHAIDVV

SEQ ID NO: 94354 - protein, 9 aa, synthetic construct
  source 1..9: note = Seed: VVVGAGDVG (KRAS G13D)
VVVHALDVA

SEQ ID NO: 94355 - protein, 9 aa, synthetic construct
  source 1..9: note = Seed: VVVGAGDVG (KRAS G13D)
VVVHALDVI

SEQ ID NO: 94356 - protein, 9 aa, synthetic construct
  source 1..9: note = Seed: VVVGAGDVG (KRAS G13D)
VVVHALDVL

SEQ ID NO: 94357 - protein, 9 aa, synthetic construct
  source 1..9: note = Seed: VVVGAGDVG (KRAS G13D)
VVVHALDVM

SEQ ID NO: 94358 - protein, 9 aa, synthetic construct
  source 1..9: note = Seed: VVVGAGDVG (KRAS G13D)
VVVHALDVV

SEQ ID NO: 94359 - protein, 9 aa, synthetic construct
  source 1..9: note = Seed: VVVGAGDVG (KRAS G13D)
VVVHAMDVV

SEQ ID NO: 94360 - protein, 9 aa, synthetic construct
  source 1..9: note = Seed: VVVGAGDVG (KRAS G13D)
VVVHANDVA

SEQ ID NO: 94361 - protein, 9 aa, synthetic construct
  source 1..9: note = Seed: VVVGAGDVG (KRAS G13D)
VVVHASDVL

SEQ ID NO: 94362 - protein, 9 aa, synthetic construct
  source 1..9: note = Seed: VVVGAGDVG (KRAS G13D)
VVVHATDVA

SEQ ID NO: 94363 - protein, 9 aa, synthetic construct
  source 1..9: note = Seed: VVVGAGDVG (KRAS G13D)
VVVHATDVS

SEQ ID NO: 94364 - protein, 9 aa, synthetic construct
  source 1..9: note = Seed: VVVGAGDVG (KRAS G13D)
VVVHAVDVI

SEQ ID NO: 94365 - protein, 9 aa, synthetic construct
  source 1..9: note = Seed: VVVGAGDVG (KRAS G13D)
VVVHAVDVS

SEQ ID NO: 94366 - protein, 9 aa, synthetic construct
  source 1..9: note = Seed: VVVGAGDVG (KRAS G13D)
VVVHAVDVV

SEQ ID NO: 94367 - protein, 9 aa, synthetic construct
  source 1..9: note = Seed: VVVGAGDVG (KRAS G13D)
VVVIAADVA

SEQ ID NO: 94368 - protein, 9 aa, synthetic construct
  source 1..9: note = Seed: VVVGAGDVG (KRAS G13D)
VVVIAADVH

SEQ ID NO: 94369 - protein, 9 aa, synthetic construct
  source 1..9: note = Seed: VVVGAGDVG (KRAS G13D)
VVVIAADVM

SEQ ID NO: 94370 - protein, 9 aa, synthetic construct
  source 1..9: note = Seed: VVVGAGDVG (KRAS G13D)
VVVIAADVN

SEQ ID NO: 94371 - protein, 9 aa, synthetic construct
  source 1..9: note = Seed: VVVGAGDVG (KRAS G13D)
VVVIAADVQ

SEQ ID NO: 94372 - protein, 9 aa, synthetic construct
  source 1..9: note = Seed: VVVGAGDVG (KRAS G13D)
VVVIAADVS

SEQ ID NO: 94373 - protein, 9 aa, synthetic construct
  source 1..9: note = Seed: VVVGAGDVG (KRAS G13D)
VVVIAADVT

SEQ ID NO: 94374 - protein, 9 aa, synthetic construct
  source 1..9: note = Seed: VVVGAGDVG (KRAS G13D)
VVVIAADVV

SEQ ID NO: 94375 - protein, 9 aa, synthetic construct
  source 1..9: note = Seed: VVVGAGDVG (KRAS G13D)
VVVIADDVA

SEQ ID NO: 94376 - protein, 9 aa, synthetic construct
  source 1..9: note = Seed: VVVGAGDVG (KRAS G13D)
VVVIANDVA

SEQ ID NO: 94377 - protein, 9 aa, synthetic construct
  source 1..9: note = Seed: VVVGAGDVG (KRAS G13D)
VVVIANDVG

SEQ ID NO: 94378 - protein, 9 aa, synthetic construct
  source 1..9: note = Seed: VVVGAGDVG (KRAS G13D)
VVVIANDVH

SEQ ID NO: 94379 - protein, 9 aa, synthetic construct
  source 1..9: note = Seed: VVVGAGDVG (KRAS G13D)
VVVIANDVI

SEQ ID NO: 94380 - protein, 9 aa, synthetic construct
  source 1..9: note = Seed: VVVGAGDVG (KRAS G13D)
VVVIANDVL

SEQ ID NO: 94381 - protein, 9 aa, synthetic construct
  source 1..9: note = Seed: VVVGAGDVG (KRAS G13D)
VVVIANDVM

SEQ ID NO: 94382 - protein, 9 aa, synthetic construct
  source 1..9: note = Seed: VVVGAGDVG (KRAS G13D)
VVVIANDVN

SEQ ID NO: 94383 - protein, 9 aa, synthetic construct
  source 1..9: note = Seed: VVVGAGDVG (KRAS G13D)
VVVIANDVP

SEQ ID NO: 94384 - protein, 9 aa, synthetic construct
  source 1..9: note = Seed: VVVGAGDVG (KRAS G13D)
VVVIANDVQ

SEQ ID NO: 94385 - protein, 9 aa, synthetic construct
  source 1..9: note = Seed: VVVGAGDVG (KRAS G13D)
VVVIANDVS

SEQ ID NO: 94386 - protein, 9 aa, synthetic construct
  source 1..9: note = Seed: VVVGAGDVG (KRAS G13D)
VVVIANDVT

SEQ ID NO: 94387 - protein, 9 aa, synthetic construct
  source 1..9: note = Seed: VVVGAGDVG (KRAS G13D)
VVVIANDVV

SEQ ID NO: 94388 - protein, 9 aa, synthetic construct
  source 1..9: note = Seed: VVVGAGDVG (KRAS G13D)
VVVIAPDVA

SEQ ID NO: 94389 - protein, 9 aa, synthetic construct
  source 1..9: note = Seed: VVVGAGDVG (KRAS G13D)
VVVIAPDVH

SEQ ID NO: 94390 - protein, 9 aa, synthetic construct
  source 1..9: note = Seed: VVVGAGDVG (KRAS G13D)
VVVIAPDVI

SEQ ID NO: 94391 - protein, 9 aa, synthetic construct
  source 1..9: note = Seed: VVVGAGDVG (KRAS G13D)
VVVIAPDVL

SEQ ID NO: 94392 - protein, 9 aa, synthetic construct
  source 1..9: note = Seed: VVVGAGDVG (KRAS G13D)
VVVIAPDVM

SEQ ID NO: 94393 - protein, 9 aa, synthetic construct
  source 1..9: note = Seed: VVVGAGDVG (KRAS G13D)
VVVIAPDVN

SEQ ID NO: 94394 - protein, 9 aa, synthetic construct
  source 1..9: note = Seed: VVVGAGDVG (KRAS G13D)
VVVIAPDVQ

SEQ ID NO: 94395 - protein, 9 aa, synthetic construct
  source 1..9: note = Seed: VVVGAGDVG (KRAS G13D)
VVVIAPDVS

SEQ ID NO: 94396 - protein, 9 aa, synthetic construct
  source 1..9: note = Seed: VVVGAGDVG (KRAS G13D)
VVVIAPDVT

SEQ ID NO: 94397 - protein, 9 aa, synthetic construct
  source 1..9: note = Seed: VVVGAGDVG (KRAS G13D)
VVVIAPDVV

SEQ ID NO: 94398 - protein, 9 aa, synthetic construct
  source 1..9: note = Seed: VVVGAGDVG (KRAS G13D)
VVVIAPDVY

SEQ ID NO: 94399 - protein, 9 aa, synthetic construct
  source 1..9: note = Seed: VVVGAGDVG (KRAS G13D)
VVVIASDVA

SEQ ID NO: 94400 - protein, 9 aa, synthetic construct
  source 1..9: note = Seed: VVVGAGDVG (KRAS G13D)
VVVIASDVG

SEQ ID NO: 94401 - protein, 9 aa, synthetic construct
  source 1..9: note = Seed: VVVGAGDVG (KRAS G13D)
VVVIASDVH

SEQ ID NO: 94402 - protein, 9 aa, synthetic construct
  source 1..9: note = Seed: VVVGAGDVG (KRAS G13D)
VVVIASDVL

SEQ ID NO: 94403 - protein, 9 aa, synthetic construct
  source 1..9: note = Seed: VVVGAGDVG (KRAS G13D)
VVVIASDVM

SEQ ID NO: 94404 - protein, 9 aa, synthetic construct
  source 1..9: note = Seed: VVVGAGDVG (KRAS G13D)
VVVIASDVN

SEQ ID NO: 94405 - protein, 9 aa, synthetic construct
  source 1..9: note = Seed: VVVGAGDVG (KRAS G13D)
VVVIASDVQ

SEQ ID NO: 94406 - protein, 9 aa, synthetic construct
  source 1..9: note = Seed: VVVGAGDVG (KRAS G13D)
VVVIASDVS

SEQ ID NO: 94407 - protein, 9 aa, synthetic construct
  source 1..9: note = Seed: VVVGAGDVG (KRAS G13D)
VVVIASDVT

SEQ ID NO: 94408 - protein, 9 aa, synthetic construct
  source 1..9: note = Seed: VVVGAGDVG (KRAS G13D)
VVVIASDVV

SEQ ID NO: 94409 - protein, 9 aa, synthetic construct
  source 1..9: note = Seed: VVVGAGDVG (KRAS G13D)
VVVIATDVA

SEQ ID NO: 94410 - protein, 9 aa, synthetic construct
  source 1..9: note = Seed: VVVGAGDVG (KRAS G13D)
VVVIATDVG

SEQ ID NO: 94411 - protein, 9 aa, synthetic construct
  source 1..9: note = Seed: VVVGAGDVG (KRAS G13D)
VVVIATDVH

SEQ ID NO: 94412 - protein, 9 aa, synthetic construct
  source 1..9: note = Seed: VVVGAGDVG (KRAS G13D)
VVVIATDVM

SEQ ID NO: 94413 - protein, 9 aa, synthetic construct
  source 1..9: note = Seed: VVVGAGDVG (KRAS G13D)
VVVIATDVN

SEQ ID NO: 94414 - protein, 9 aa, synthetic construct
  source 1..9: note = Seed: VVVGAGDVG (KRAS G13D)
VVVIATDVQ

SEQ ID NO: 94415 - protein, 9 aa, synthetic construct
  source 1..9: note = Seed: VVVGAGDVG (KRAS G13D)
VVVIATDVS

SEQ ID NO: 94416 - protein, 9 aa, synthetic construct
  source 1..9: note = Seed: VVVGAGDVG (KRAS G13D)
VVVIATDVT

SEQ ID NO: 94417 - protein, 9 aa, synthetic construct
  source 1..9: note = Seed: VVVGAGDVG (KRAS G13D)
VVVIAVDVA

SEQ ID NO: 94418 - protein, 9 aa, synthetic construct
  source 1..9: note = Seed: VVVGAGDVG (KRAS G13D)
VVVIAVDVH

SEQ ID NO: 94419 - protein, 9 aa, synthetic construct
  source 1..9: note = Seed: VVVGAGDVG (KRAS G13D)
VVVIAVDVS

SEQ ID NO: 94420 - protein, 9 aa, synthetic construct
  source 1..9: note = Seed: VVVGAGDVG (KRAS G13D)
VVVLAADVA

SEQ ID NO: 94421 - protein, 9 aa, synthetic construct
  source 1..9: note = Seed: VVVGAGDVG (KRAS G13D)
VVVLAADVE

SEQ ID NO: 94422 - protein, 9 aa, synthetic construct
  source 1..9: note = Seed: VVVGAGDVG (KRAS G13D)
VVVLAADVG

SEQ ID NO: 94423 - protein, 9 aa, synthetic construct
  source 1..9: note = Seed: VVVGAGDVG (KRAS G13D)
VVVLAADVH

SEQ ID NO: 94424 - protein, 9 aa, synthetic construct
  source 1..9: note = Seed: VVVGAGDVG (KRAS G13D)
VVVLAADVI

SEQ ID NO: 94425 - protein, 9 aa, synthetic construct
  source 1..9: note = Seed: VVVGAGDVG (KRAS G13D)
VVVLAADVL

SEQ ID NO: 94426 - protein, 9 aa, synthetic construct
  source 1..9: note = Seed: VVVGAGDVG (KRAS G13D)
VVVLAADVM

SEQ ID NO: 94427 - protein, 9 aa, synthetic construct
  source 1..9: note = Seed: VVVGAGDVG (KRAS G13D)
VVVLAADVN

SEQ ID NO: 94428 - protein, 9 aa, synthetic construct
  source 1..9: note = Seed: VVVGAGDVG (KRAS G13D)
VVVLAADVP

SEQ ID NO: 94429 - protein, 9 aa, synthetic construct
  source 1..9: note = Seed: VVVGAGDVG (KRAS G13D)
VVVLAADVQ

SEQ ID NO: 94430 - protein, 9 aa, synthetic construct
  source 1..9: note = Seed: VVVGAGDVG (KRAS G13D)
VVVLAADVS

SEQ ID NO: 94431 - protein, 9 aa, synthetic construct
  source 1..9: note = Seed: VVVGAGDVG (KRAS G13D)
VVVLAADVT

SEQ ID NO: 94432 - protein, 9 aa, synthetic construct
  source 1..9: note = Seed: VVVGAGDVG (KRAS G13D)
VVVLAADVV

SEQ ID NO: 94433 - protein, 9 aa, synthetic construct
  source 1..9: note = Seed: VVVGAGDVG (KRAS G13D)
VVVLAADVY

SEQ ID NO: 94434 - protein, 9 aa, synthetic construct
  source 1..9: note = Seed: VVVGAGDVG (KRAS G13D)
VVVLADDVA

SEQ ID NO: 94435 - protein, 9 aa, synthetic construct
  source 1..9: note = Seed: VVVGAGDVG (KRAS G13D)
VVVLAGDVA

SEQ ID NO: 94436 - protein, 9 aa, synthetic construct
  source 1..9: note = Seed: VVVGAGDVG (KRAS G13D)
VVVLAGDVN

SEQ ID NO: 94437 - protein, 9 aa, synthetic construct
  source 1..9: note = Seed: VVVGAGDVG (KRAS G13D)
VVVLAGDVS

SEQ ID NO: 94438 - protein, 9 aa, synthetic construct
  source 1..9: note = Seed: VVVGAGDVG (KRAS G13D)
VVVLAHDVA

SEQ ID NO: 94439 - protein, 9 aa, synthetic construct
  source 1..9: note = Seed: VVVGAGDVG (KRAS G13D)
VVVLAHDVG

SEQ ID NO: 94440 - protein, 9 aa, synthetic construct
  source 1..9: note = Seed: VVVGAGDVG (KRAS G13D)
VVVLAHDVN

SEQ ID NO: 94441 - protein, 9 aa, synthetic construct
  source 1..9: note = Seed: VVVGAGDVG (KRAS G13D)
VVVLAHDVS

SEQ ID NO: 94442 - protein, 9 aa, synthetic construct
  source 1..9: note = Seed: VVVGAGDVG (KRAS G13D)
VVVLAIDVA

SEQ ID NO: 94443 - protein, 9 aa, synthetic construct
  source 1..9: note = Seed: VVVGAGDVG (KRAS G13D)
VVVLAIDVH

SEQ ID NO: 94444 - protein, 9 aa, synthetic construct
  source 1..9: note = Seed: VVVGAGDVG (KRAS G13D)
VVVLAIDVM

SEQ ID NO: 94445 - protein, 9 aa, synthetic construct
  source 1..9: note = Seed: VVVGAGDVG (KRAS G13D)
VVVLAIDVN

SEQ ID NO: 94446 - protein, 9 aa, synthetic construct
  source 1..9: note = Seed: VVVGAGDVG (KRAS G13D)
VVVLAIDVQ

SEQ ID NO: 94447 - protein, 9 aa, synthetic construct
  source 1..9: note = Seed: VVVGAGDVG (KRAS G13D)
VVVLAIDVS

SEQ ID NO: 94448 - protein, 9 aa, synthetic construct
  source 1..9: note = Seed: VVVGAGDVG (KRAS G13D)
VVVLAIDVT

SEQ ID NO: 94449 - protein, 9 aa, synthetic construct
  source 1..9: note = Seed: VVVGAGDVG (KRAS G13D)
VVVLANDVA

SEQ ID NO: 94450 - protein, 9 aa, synthetic construct
  source 1..9: note = Seed: VVVGAGDVG (KRAS G13D)
VVVLANDVD

SEQ ID NO: 94451 - protein, 9 aa, synthetic construct
  source 1..9: note = Seed: VVVGAGDVG (KRAS G13D)
VVVLANDVE

SEQ ID NO: 94452 - protein, 9 aa, synthetic construct
  source 1..9: note = Seed: VVVGAGDVG (KRAS G13D)
VVVLANDVF

SEQ ID NO: 94453 - protein, 9 aa, synthetic construct
  source 1..9: note = Seed: VVVGAGDVG (KRAS G13D)
VVVLANDVG

SEQ ID NO: 94454 - protein, 9 aa, synthetic construct
  source 1..9: note = Seed: VVVGAGDVG (KRAS G13D)
VVVLANDVH

SEQ ID NO: 94455 - protein, 9 aa, synthetic construct
  source 1..9: note = Seed: VVVGAGDVG (KRAS G13D)
VVVLANDVI

SEQ ID NO: 94456 - protein, 9 aa, synthetic construct
  source 1..9: note = Seed: VVVGAGDVG (KRAS G13D)
VVVLANDVL

SEQ ID NO: 94457 - protein, 9 aa, synthetic construct
  source 1..9: note = Seed: VVVGAGDVG (KRAS G13D)
VVVLANDVM

SEQ ID NO: 94458 - protein, 9 aa, synthetic construct
  source 1..9: note = Seed: VVVGAGDVG (KRAS G13D)
VVVLANDVN

SEQ ID NO: 94459 - protein, 9 aa, synthetic construct
  source 1..9: note = Seed: VVVGAGDVG (KRAS G13D)
VVVLANDVP

SEQ ID NO: 94460 - protein, 9 aa, synthetic construct
  source 1..9: note = Seed: VVVGAGDVG (KRAS G13D)
VVVLANDVQ

SEQ ID NO: 94461 - protein, 9 aa, synthetic construct
  source 1..9: note = Seed: VVVGAGDVG (KRAS G13D)
VVVLANDVS

SEQ ID NO: 94462 - protein, 9 aa, synthetic construct
  source 1..9: note = Seed: VVVGAGDVG (KRAS G13D)
VVVLANDVT

SEQ ID NO: 94463 - protein, 9 aa, synthetic construct
  source 1..9: note = Seed: VVVGAGDVG (KRAS G13D)
VVVLANDVV

SEQ ID NO: 94464 - protein, 9 aa, synthetic construct
  source 1..9: note = Seed: VVVGAGDVG (KRAS G13D)
VVVLANDVY

SEQ ID NO: 94465 - protein, 9 aa, synthetic construct
  source 1..9: note = Seed: VVVGAGDVG (KRAS G13D)
VVVLAPDVA

SEQ ID NO: 94466 - protein, 9 aa, synthetic construct
  source 1..9: note = Seed: VVVGAGDVG (KRAS G13D)
VVVLAPDVG

SEQ ID NO: 94467 - protein, 9 aa, synthetic construct
  source 1..9: note = Seed: VVVGAGDVG (KRAS G13D)
VVVLAPDVH

SEQ ID NO: 94468 - protein, 9 aa, synthetic construct
  source 1..9: note = Seed: VVVGAGDVG (KRAS G13D)
VVVLAPDVI

SEQ ID NO: 94469 - protein, 9 aa, synthetic construct
  source 1..9: note = Seed: VVVGAGDVG (KRAS G13D)
VVVLAPDVL

SEQ ID NO: 94470 - protein, 9 aa, synthetic construct
  source 1..9: note = Seed: VVVGAGDVG (KRAS G13D)
VVVLAPDVM

SEQ ID NO: 94471 - protein, 9 aa, synthetic construct
  source 1..9: note = Seed: VVVGAGDVG (KRAS G13D)
VVVLAPDVN

SEQ ID NO: 94472 - protein, 9 aa, synthetic construct
  source 1..9: note = Seed: VVVGAGDVG (KRAS G13D)
VVVLAPDVP

SEQ ID NO: 94473 - protein, 9 aa, synthetic construct
  source 1..9: note = Seed: VVVGAGDVG (KRAS G13D)
VVVLAPDVQ

SEQ ID NO: 94474 - protein, 9 aa, synthetic construct
  source 1..9: note = Seed: VVVGAGDVG (KRAS G13D)
VVVLAPDVS

SEQ ID NO: 94475 - protein, 9 aa, synthetic construct
  source 1..9: note = Seed: VVVGAGDVG (KRAS G13D)
VVVLAPDVT

SEQ ID NO: 94476 - protein, 9 aa, synthetic construct
  source 1..9: note = Seed: VVVGAGDVG (KRAS G13D)
VVVLAPDVV

SEQ ID NO: 94477 - protein, 9 aa, synthetic construct
  source 1..9: note = Seed: VVVGAGDVG (KRAS G13D)
VVVLAPDVY

SEQ ID NO: 94478 - protein, 9 aa, synthetic construct
  source 1..9: note = Seed: VVVGAGDVG (KRAS G13D)
VVVLASDVA

SEQ ID NO: 94479 - protein, 9 aa, synthetic construct
  source 1..9: note = Seed: VVVGAGDVG (KRAS G13D)
VVVLASDVE

SEQ ID NO: 94480 - protein, 9 aa, synthetic construct
  source 1..9: note = Seed: VVVGAGDVG (KRAS G13D)
VVVLASDVG

SEQ ID NO: 94481 - protein, 9 aa, synthetic construct
  source 1..9: note = Seed: VVVGAGDVG (KRAS G13D)
VVVLASDVH

SEQ ID NO: 94482 - protein, 9 aa, synthetic construct
  source 1..9: note = Seed: VVVGAGDVG (KRAS G13D)
VVVLASDVI

SEQ ID NO: 94483 - protein, 9 aa, synthetic construct
  source 1..9: note = Seed: VVVGAGDVG (KRAS G13D)
VVVLASDVL

SEQ ID NO: 94484 - protein, 9 aa, synthetic construct
  source 1..9: note = Seed: VVVGAGDVG (KRAS G13D)
VVVLASDVM

SEQ ID NO: 94485 - protein, 9 aa, synthetic construct
  source 1..9: note = Seed: VVVGAGDVG (KRAS G13D)
VVVLASDVN

SEQ ID NO: 94486 - protein, 9 aa, synthetic construct
  source 1..9: note = Seed: VVVGAGDVG (KRAS G13D)
VVVLASDVP

SEQ ID NO: 94487 - protein, 9 aa, synthetic construct
  source 1..9: note = Seed: VVVGAGDVG (KRAS G13D)
VVVLASDVQ

SEQ ID NO: 94488 - protein, 9 aa, synthetic construct
  source 1..9: note = Seed: VVVGAGDVG (KRAS G13D)
VVVLASDVS

SEQ ID NO: 94489 - protein, 9 aa, synthetic construct
  source 1..9: note = Seed: VVVGAGDVG (KRAS G13D)
VVVLASDVT

SEQ ID NO: 94490 - protein, 9 aa, synthetic construct
  source 1..9: note = Seed: VVVGAGDVG (KRAS G13D)
VVVLASDVV

SEQ ID NO: 94491 - protein, 9 aa, synthetic construct
  source 1..9: note = Seed: VVVGAGDVG (KRAS G13D)
VVVLASDVY

SEQ ID NO: 94492 - protein, 9 aa, synthetic construct
  source 1..9: note = Seed: VVVGAGDVG (KRAS G13D)
VVVLATDVA

SEQ ID NO: 94493 - protein, 9 aa, synthetic construct
  source 1..9: note = Seed: VVVGAGDVG (KRAS G13D)
VVVLATDVG

SEQ ID NO: 94494 - protein, 9 aa, synthetic construct
  source 1..9: note = Seed: VVVGAGDVG (KRAS G13D)
VVVLATDVH

SEQ ID NO: 94495 - protein, 9 aa, synthetic construct
  source 1..9: note = Seed: VVVGAGDVG (KRAS G13D)
VVVLATDVK

SEQ ID NO: 94496 - protein, 9 aa, synthetic construct
  source 1..9: note = Seed: VVVGAGDVG (KRAS G13D)
VVVLATDVL

SEQ ID NO: 94497 - protein, 9 aa, synthetic construct
  source 1..9: note = Seed: VVVGAGDVG (KRAS G13D)
VVVLATDVM

SEQ ID NO: 94498 - protein, 9 aa, synthetic construct
  source 1..9: note = Seed: VVVGAGDVG (KRAS G13D)
VVVLATDVN

SEQ ID NO: 94499 - protein, 9 aa, synthetic construct
  source 1..9: note = Seed: VVVGAGDVG (KRAS G13D)
VVVLATDVP

SEQ ID NO: 94500 - protein, 9 aa, synthetic construct
  source 1..9: note = Seed: VVVGAGDVG (KRAS G13D)
VVVLATDVQ

SEQ ID NO: 94501 - protein, 9 aa, synthetic construct
  source 1..9: note = Seed: VVVGAGDVG (KRAS G13D)
VVVLATDVR

SEQ ID NO: 94502 - protein, 9 aa, synthetic construct
  source 1..9: note = Seed: VVVGAGDVG (KRAS G13D)
VVVLATDVS

SEQ ID NO: 94503 - protein, 9 aa, synthetic construct
  source 1..9: note = Seed: VVVGAGDVG (KRAS G13D)
VVVLATDVT

SEQ ID NO: 94504 - protein, 9 aa, synthetic construct
  source 1..9: note = Seed: VVVGAGDVG (KRAS G13D)
VVVLATDVV

SEQ ID NO: 94505 - protein, 9 aa, synthetic construct
  source 1..9: note = Seed: VVVGAGDVG (KRAS G13D)
VVVLAVDVA

SEQ ID NO: 94506 - protein, 9 aa, synthetic construct
  source 1..9: note = Seed: VVVGAGDVG (KRAS G13D)
VVVLAVDVH

SEQ ID NO: 94507 - protein, 9 aa, synthetic construct
  source 1..9: note = Seed: VVVGAGDVG (KRAS G13D)
VVVLAVDVN

SEQ ID NO: 94508 - protein, 9 aa, synthetic construct
  source 1..9: note = Seed: VVVGAGDVG (KRAS G13D)
VVVLAVDVS

SEQ ID NO: 94509 - protein, 9 aa, synthetic construct
  source 1..9: note = Seed: VVVGAGDVG (KRAS G13D)
VVVMAADVA

SEQ ID NO: 94510 - protein, 9 aa, synthetic construct
  source 1..9: note = Seed: VVVGAGDVG (KRAS G13D)
VVVMAADVE

SEQ ID NO: 94511 - protein, 9 aa, synthetic construct
  source 1..9: note = Seed: VVVGAGDVG (KRAS G13D)
VVVMAADVF

SEQ ID NO: 94512 - protein, 9 aa, synthetic construct
  source 1..9: note = Seed: VVVGAGDVG (KRAS G13D)
VVVMAADVG

SEQ ID NO: 94513 - protein, 9 aa, synthetic construct
  source 1..9: note = Seed: VVVGAGDVG (KRAS G13D)
VVVMAADVH

SEQ ID NO: 94514 - protein, 9 aa, synthetic construct
  source 1..9: note = Seed: VVVGAGDVG (KRAS G13D)
VVVMAADVI

SEQ ID NO: 94515 - protein, 9 aa, synthetic construct
  source 1..9: note = Seed: VVVGAGDVG (KRAS G13D)
VVVMAADVL

SEQ ID NO: 94516 - protein, 9 aa, synthetic construct
  source 1..9: note = Seed: VVVGAGDVG (KRAS G13D)
VVVMAADVM

SEQ ID NO: 94517 - protein, 9 aa, synthetic construct
  source 1..9: note = Seed: VVVGAGDVG (KRAS G13D)
VVVMAADVN

SEQ ID NO: 94518 - protein, 9 aa, synthetic construct
  source 1..9: note = Seed: VVVGAGDVG (KRAS G13D)
VVVMAADVP

SEQ ID NO: 94519 - protein, 9 aa, synthetic construct
  source 1..9: note = Seed: VVVGAGDVG (KRAS G13D)
VVVMAADVQ

SEQ ID NO: 94520 - protein, 9 aa, synthetic construct
  source 1..9: note = Seed: VVVGAGDVG (KRAS G13D)
VVVMAADVR

SEQ ID NO: 94521 - protein, 9 aa, synthetic construct
  source 1..9: note = Seed: VVVGAGDVG (KRAS G13D)
VVVMAADVS

SEQ ID NO: 94522 - protein, 9 aa, synthetic construct
  source 1..9: note = Seed: VVVGAGDVG (KRAS G13D)
VVVMAADVT

SEQ ID NO: 94523 - protein, 9 aa, synthetic construct
  source 1..9: note = Seed: VVVGAGDVG (KRAS G13D)
VVVMAADVV

SEQ ID NO: 94524 - protein, 9 aa, synthetic construct
  source 1..9: note = Seed: VVVGAGDVG (KRAS G13D)
VVVMAADVY

SEQ ID NO: 94525 - protein, 9 aa, synthetic construct
  source 1..9: note = Seed: VVVGAGDVG (KRAS G13D)
VVVMADDVA

SEQ ID NO: 94526 - protein, 9 aa, synthetic construct
  source 1..9: note = Seed: VVVGAGDVG (KRAS G13D)
VVVMADDVF

SEQ ID NO: 94527 - protein, 9 aa, synthetic construct
  source 1..9: note = Seed: VVVGAGDVG (KRAS G13D)
VVVMADDVI

SEQ ID NO: 94528 - protein, 9 aa, synthetic construct
  source 1..9: note = Seed: VVVGAGDVG (KRAS G13D)
VVVMADDVL

SEQ ID NO: 94529 - protein, 9 aa, synthetic construct
  source 1..9: note = Seed: VVVGAGDVG (KRAS G13D)
VVVMADDVM

SEQ ID NO: 94530 - protein, 9 aa, synthetic construct
  source 1..9: note = Seed: VVVGAGDVG (KRAS G13D)
VVVMADDVS

SEQ ID NO: 94531 - protein, 9 aa, synthetic construct
  source 1..9: note = Seed: VVVGAGDVG (KRAS G13D)
VVVMADDVV

SEQ ID NO: 94532 - protein, 9 aa, synthetic construct
  source 1..9: note = Seed: VVVGAGDVG (KRAS G13D)
VVVMADDVY

SEQ ID NO: 94533 - protein, 9 aa, synthetic construct
  source 1..9: note = Seed: VVVGAGDVG (KRAS G13D)
VVVMAEDVA

SEQ ID NO: 94534 - protein, 9 aa, synthetic construct
  source 1..9: note = Seed: VVVGAGDVG (KRAS G13D)
VVVMAGDVA

SEQ ID NO: 94535 - protein, 9 aa, synthetic construct
  source 1..9: note = Seed: VVVGAGDVG (KRAS G13D)
VVVMAGDVH

SEQ ID NO: 94536 - protein, 9 aa, synthetic construct
  source 1..9: note = Seed: VVVGAGDVG (KRAS G13D)
VVVMAGDVI

SEQ ID NO: 94537 - protein, 9 aa, synthetic construct
  source 1..9: note = Seed: VVVGAGDVG (KRAS G13D)
VVVMAGDVL

SEQ ID NO: 94538 - protein, 9 aa, synthetic construct
  source 1..9: note = Seed: VVVGAGDVG (KRAS G13D)
VVVMAGDVN

SEQ ID NO: 94539 - protein, 9 aa, synthetic construct
  source 1..9: note = Seed: VVVGAGDVG (KRAS G13D)
VVVMAGDVQ

SEQ ID NO: 94540 - protein, 9 aa, synthetic construct
  source 1..9: note = Seed: VVVGAGDVG (KRAS G13D)
VVVMAGDVS

SEQ ID NO: 94541 - protein, 9 aa, synthetic construct
  source 1..9: note = Seed: VVVGAGDVG (KRAS G13D)
VVVMAGDVV

SEQ ID NO: 94542 - protein, 9 aa, synthetic construct
  source 1..9: note = Seed: VVVGAGDVG (KRAS G13D)
VVVMAHDVA

SEQ ID NO: 94543 - protein, 9 aa, synthetic construct
  source 1..9: note = Seed: VVVGAGDVG (KRAS G13D)
VVVMAHDVG

SEQ ID NO: 94544 - protein, 9 aa, synthetic construct
  source 1..9: note = Seed: VVVGAGDVG (KRAS G13D)
VVVMAHDVN

SEQ ID NO: 94545 - protein, 9 aa, synthetic construct
  source 1..9: note = Seed: VVVGAGDVG (KRAS G13D)
VVVMAHDVS

SEQ ID NO: 94546 - protein, 9 aa, synthetic construct
  source 1..9: note = Seed: VVVGAGDVG (KRAS G13D)
VVVMAIDVA

SEQ ID NO: 94547 - protein, 9 aa, synthetic construct
  source 1..9: note = Seed: VVVGAGDVG (KRAS G13D)
VVVMAIDVH

SEQ ID NO: 94548 - protein, 9 aa, synthetic construct
  source 1..9: note = Seed: VVVGAGDVG (KRAS G13D)
VVVMAIDVK

SEQ ID NO: 94549 - protein, 9 aa, synthetic construct
  source 1..9: note = Seed: VVVGAGDVG (KRAS G13D)
VVVMAIDVM

SEQ ID NO: 94550 - protein, 9 aa, synthetic construct
  source 1..9: note = Seed: VVVGAGDVG (KRAS G13D)
VVVMAIDVN

SEQ ID NO: 94551 - protein, 9 aa, synthetic construct
  source 1..9: note = Seed: VVVGAGDVG (KRAS G13D)
VVVMAIDVQ

SEQ ID NO: 94552 - protein, 9 aa, synthetic construct
  source 1..9: note = Seed: VVVGAGDVG (KRAS G13D)
VVVMAIDVS

SEQ ID NO: 94553 - protein, 9 aa, synthetic construct
  source 1..9: note = Seed: VVVGAGDVG (KRAS G13D)
VVVMAIDVT

SEQ ID NO: 94554 - protein, 9 aa, synthetic construct
  source 1..9: note = Seed: VVVGAGDVG (KRAS G13D)
VVVMAIDVV

SEQ ID NO: 94555 - protein, 9 aa, synthetic construct
  source 1..9: note = Seed: VVVGAGDVG (KRAS G13D)
VVVMAIDVY

SEQ ID NO: 94556 - protein, 9 aa, synthetic construct
  source 1..9: note = Seed: VVVGAGDVG (KRAS G13D)
VVVMALDVA

SEQ ID NO: 94557 - protein, 9 aa, synthetic construct
  source 1..9: note = Seed: VVVGAGDVG (KRAS G13D)
VVVMALDVQ

SEQ ID NO: 94558 - protein, 9 aa, synthetic construct
  source 1..9: note = Seed: VVVGAGDVG (KRAS G13D)
VVVMALDVS

SEQ ID NO: 94559 - protein, 9 aa, synthetic construct
  source 1..9: note = Seed: VVVGAGDVG (KRAS G13D)
VVVMANDVA

SEQ ID NO: 94560 - protein, 9 aa, synthetic construct
  source 1..9: note = Seed: VVVGAGDVG (KRAS G13D)
VVVMANDVC

SEQ ID NO: 94561 - protein, 9 aa, synthetic construct
  source 1..9: note = Seed: VVVGAGDVG (KRAS G13D)
VVVMANDVD

SEQ ID NO: 94562 - protein, 9 aa, synthetic construct
  source 1..9: note = Seed: VVVGAGDVG (KRAS G13D)
VVVMANDVE

SEQ ID NO: 94563 - protein, 9 aa, synthetic construct
  source 1..9: note = Seed: VVVGAGDVG (KRAS G13D)
VVVMANDVF

SEQ ID NO: 94564 - protein, 9 aa, synthetic construct
  source 1..9: note = Seed: VVVGAGDVG (KRAS G13D)
VVVMANDVG

SEQ ID NO: 94565 - protein, 9 aa, synthetic construct
  source 1..9: note = Seed: VVVGAGDVG (KRAS G13D)
VVVMANDVH

SEQ ID NO: 94566 - protein, 9 aa, synthetic construct
  source 1..9: note = Seed: VVVGAGDVG (KRAS G13D)
VVVMANDVI

SEQ ID NO: 94567 - protein, 9 aa, synthetic construct
  source 1..9: note = Seed: VVVGAGDVG (KRAS G13D)
VVVMANDVK

SEQ ID NO: 94568 - protein, 9 aa, synthetic construct
  source 1..9: note = Seed: VVVGAGDVG (KRAS G13D)
VVVMANDVL

SEQ ID NO: 94569 - protein, 9 aa, synthetic construct
  source 1..9: note = Seed: VVVGAGDVG (KRAS G13D)
VVVMANDVM

SEQ ID NO: 94570 - protein, 9 aa, synthetic construct
  source 1..9: note = Seed: VVVGAGDVG (KRAS G13D)
VVVMANDVN

SEQ ID NO: 94571 - protein, 9 aa, synthetic construct
  source 1..9: note = Seed: VVVGAGDVG (KRAS G13D)
VVVMANDVP

SEQ ID NO: 94572 - protein, 9 aa, synthetic construct
  source 1..9: note = Seed: VVVGAGDVG (KRAS G13D)
VVVMANDVQ

SEQ ID NO: 94573 - protein, 9 aa, synthetic construct
  source 1..9: note = Seed: VVVGAGDVG (KRAS G13D)
VVVMANDVR

SEQ ID NO: 94574 - protein, 9 aa, synthetic construct
  source 1..9: note = Seed: VVVGAGDVG (KRAS G13D)
VVVMANDVS

SEQ ID NO: 94575 - protein, 9 aa, synthetic construct
  source 1..9: note = Seed: VVVGAGDVG (KRAS G13D)
VVVMANDVT

SEQ ID NO: 94576 - protein, 9 aa, synthetic construct
  source 1..9: note = Seed: VVVGAGDVG (KRAS G13D)
VVVMANDVV

SEQ ID NO: 94577 - protein, 9 aa, synthetic construct
  source 1..9: note = Seed: VVVGAGDVG (KRAS G13D)
VVVMANDVY

SEQ ID NO: 94578 - protein, 9 aa, synthetic construct
  source 1..9: note = Seed: VVVGAGDVG (KRAS G13D)
VVVMAPDVA

SEQ ID NO: 94579 - protein, 9 aa, synthetic construct
  source 1..9: note = Seed: VVVGAGDVG (KRAS G13D)
VVVMAPDVD

SEQ ID NO: 94580 - protein, 9 aa, synthetic construct
  source 1..9: note = Seed: VVVGAGDVG (KRAS G13D)
VVVMAPDVE

SEQ ID NO: 94581 - protein, 9 aa, synthetic construct
  source 1..9: note = Seed: VVVGAGDVG (KRAS G13D)
VVVMAPDVG

SEQ ID NO: 94582 - protein, 9 aa, synthetic construct
  source 1..9: note = Seed: VVVGAGDVG (KRAS G13D)
VVVMAPDVH

SEQ ID NO: 94583 - protein, 9 aa, synthetic construct
  source 1..9: note = Seed: VVVGAGDVG (KRAS G13D)
VVVMAPDVI

SEQ ID NO: 94584 - protein, 9 aa, synthetic construct
  source 1..9: note = Seed: VVVGAGDVG (KRAS G13D)
VVVMAPDVL

SEQ ID NO: 94585 - protein, 9 aa, synthetic construct
  source 1..9: note = Seed: VVVGAGDVG (KRAS G13D)
VVVMAPDVM

SEQ ID NO: 94586 - protein, 9 aa, synthetic construct
  source 1..9: note = Seed: VVVGAGDVG (KRAS G13D)
VVVMAPDVN

SEQ ID NO: 94587 - protein, 9 aa, synthetic construct
  source 1..9: note = Seed: VVVGAGDVG (KRAS G13D)
VVVMAPDVP

SEQ ID NO: 94588 - protein, 9 aa, synthetic construct
  source 1..9: note = Seed: VVVGAGDVG (KRAS G13D)
VVVMAPDVQ

SEQ ID NO: 94589 - protein, 9 aa, synthetic construct
  source 1..9: note = Seed: VVVGAGDVG (KRAS G13D)
VVVMAPDVS

SEQ ID NO: 94590 - protein, 9 aa, synthetic construct
  source 1..9: note = Seed: VVVGAGDVG (KRAS G13D)
VVVMAPDVT

SEQ ID NO: 94591 - protein, 9 aa, synthetic construct
  source 1..9: note = Seed: VVVGAGDVG (KRAS G13D)
VVVMAPDVV

SEQ ID NO: 94592 - protein, 9 aa, synthetic construct
  source 1..9: note = Seed: VVVGAGDVG (KRAS G13D)
VVVMAPDVY

SEQ ID NO: 94593 - protein, 9 aa, synthetic construct
  source 1..9: note = Seed: VVVGAGDVG (KRAS G13D)
VVVMAQDVI

SEQ ID NO: 94594 - protein, 9 aa, synthetic construct
  source 1..9: note = Seed: VVVGAGDVG (KRAS G13D)
VVVMAQDVS

SEQ ID NO: 94595 - protein, 9 aa, synthetic construct
  source 1..9: note = Seed: VVVGAGDVG (KRAS G13D)
VVVMAQDVV

SEQ ID NO: 94596 - protein, 9 aa, synthetic construct
  source 1..9: note = Seed: VVVGAGDVG (KRAS G13D)
VVVMASDVA

SEQ ID NO: 94597 - protein, 9 aa, synthetic construct
  source 1..9: note = Seed: VVVGAGDVG (KRAS G13D)
VVVMASDVD

SEQ ID NO: 94598 - protein, 9 aa, synthetic construct
  source 1..9: note = Seed: VVVGAGDVG (KRAS G13D)
VVVMASDVE

SEQ ID NO: 94599 - protein, 9 aa, synthetic construct
  source 1..9: note = Seed: VVVGAGDVG (KRAS G13D)
VVVMASDVF

SEQ ID NO: 94600 - protein, 9 aa, synthetic construct
  source 1..9: note = Seed: VVVGAGDVG (KRAS G13D)
VVVMASDVG

SEQ ID NO: 94601 - protein, 9 aa, synthetic construct
  source 1..9: note = Seed: VVVGAGDVG (KRAS G13D)
VVVMASDVH

SEQ ID NO: 94602 - protein, 9 aa, synthetic construct
  source 1..9: note = Seed: VVVGAGDVG (KRAS G13D)
VVVMASDVI

SEQ ID NO: 94603 - protein, 9 aa, synthetic construct
  source 1..9: note = Seed: VVVGAGDVG (KRAS G13D)
VVVMASDVL

SEQ ID NO: 94604 - protein, 9 aa, synthetic construct
  source 1..9: note = Seed: VVVGAGDVG (KRAS G13D)
VVVMASDVM

SEQ ID NO: 94605 - protein, 9 aa, synthetic construct
  source 1..9: note = Seed: VVVGAGDVG (KRAS G13D)
VVVMASDVN

SEQ ID NO: 94606 - protein, 9 aa, synthetic construct
  source 1..9: note = Seed: VVVGAGDVG (KRAS G13D)
VVVMASDVP

SEQ ID NO: 94607 - protein, 9 aa, synthetic construct
  source 1..9: note = Seed: VVVGAGDVG (KRAS G13D)
VVVMASDVQ

SEQ ID NO: 94608 - protein, 9 aa, synthetic construct
  source 1..9: note = Seed: VVVGAGDVG (KRAS G13D)
VVVMASDVS

SEQ ID NO: 94609 - protein, 9 aa, synthetic construct
  source 1..9: note = Seed: VVVGAGDVG (KRAS G13D)
VVVMASDVT

SEQ ID NO: 94610 - protein, 9 aa, synthetic construct
  source 1..9: note = Seed: VVVGAGDVG (KRAS G13D)
VVVMASDVV

SEQ ID NO: 94611 - protein, 9 aa, synthetic construct
  source 1..9: note = Seed: VVVGAGDVG (KRAS G13D)
VVVMASDVY

SEQ ID NO: 94612 - protein, 9 aa, synthetic construct
  source 1..9: note = Seed: VVVGAGDVG (KRAS G13D)
VVVMATDVA

SEQ ID NO: 94613 - protein, 9 aa, synthetic construct
  source 1..9: note = Seed: VVVGAGDVG (KRAS G13D)
VVVMATDVG

SEQ ID NO: 94614 - protein, 9 aa, synthetic construct
  source 1..9: note = Seed: VVVGAGDVG (KRAS G13D)
VVVMATDVH

SEQ ID NO: 94615 - protein, 9 aa, synthetic construct
  source 1..9: note = Seed: VVVGAGDVG (KRAS G13D)
VVVMATDVI

SEQ ID NO: 94616 - protein, 9 aa, synthetic construct
  source 1..9: note = Seed: VVVGAGDVG (KRAS G13D)
VVVMATDVK

SEQ ID NO: 94617 - protein, 9 aa, synthetic construct
  source 1..9: note = Seed: VVVGAGDVG (KRAS G13D)
VVVMATDVL

SEQ ID NO: 94618 - protein, 9 aa, synthetic construct
  source 1..9: note = Seed: VVVGAGDVG (KRAS G13D)
VVVMATDVM

SEQ ID NO: 94619 - protein, 9 aa, synthetic construct
  source 1..9: note = Seed: VVVGAGDVG (KRAS G13D)
VVVMATDVN

SEQ ID NO: 94620 - protein, 9 aa, synthetic construct
  source 1..9: note = Seed: VVVGAGDVG (KRAS G13D)
VVVMATDVP

SEQ ID NO: 94621 - protein, 9 aa, synthetic construct
  source 1..9: note = Seed: VVVGAGDVG (KRAS G13D)
VVVMATDVQ

SEQ ID NO: 94622 - protein, 9 aa, synthetic construct
  source 1..9: note = Seed: VVVGAGDVG (KRAS G13D)
VVVMATDVR

SEQ ID NO: 94623 - protein, 9 aa, synthetic construct
  source 1..9: note = Seed: VVVGAGDVG (KRAS G13D)
VVVMATDVS

SEQ ID NO: 94624 - protein, 9 aa, synthetic construct
  source 1..9: note = Seed: VVVGAGDVG (KRAS G13D)
VVVMATDVT

SEQ ID NO: 94625 - protein, 9 aa, synthetic construct
  source 1..9: note = Seed: VVVGAGDVG (KRAS G13D)
VVVMATDVV

SEQ ID NO: 94626 - protein, 9 aa, synthetic construct
  source 1..9: note = Seed: VVVGAGDVG (KRAS G13D)
VVVMATDVY

SEQ ID NO: 94627 - protein, 9 aa, synthetic construct
  source 1..9: note = Seed: VVVGAGDVG (KRAS G13D)
VVVMAVDVA

SEQ ID NO: 94628 - protein, 9 aa, synthetic construct
  source 1..9: note = Seed: VVVGAGDVG (KRAS G13D)
VVVMAVDVH

SEQ ID NO: 94629 - protein, 9 aa, synthetic construct
  source 1..9: note = Seed: VVVGAGDVG (KRAS G13D)
VVVMAVDVM

SEQ ID NO: 94630 - protein, 9 aa, synthetic construct
  source 1..9: note = Seed: VVVGAGDVG (KRAS G13D)
VVVMAVDVN

SEQ ID NO: 94631 - protein, 9 aa, synthetic construct
  source 1..9: note = Seed: VVVGAGDVG (KRAS G13D)
VVVMAVDVQ

SEQ ID NO: 94632 - protein, 9 aa, synthetic construct
  source 1..9: note = Seed: VVVGAGDVG (KRAS G13D)
VVVMAVDVR

SEQ ID NO: 94633 - protein, 9 aa, synthetic construct
  source 1..9: note = Seed: VVVGAGDVG (KRAS G13D)
VVVMAVDVS

SEQ ID NO: 94634 - protein, 9 aa, synthetic construct
  source 1..9: note = Seed: VVVGAGDVG (KRAS G13D)
VVVMAVDVY

SEQ ID NO: 94635 - protein, 9 aa, synthetic construct
  source 1..9: note = Seed: VVVGAGDVG (KRAS G13D)
VVVNAADVA

SEQ ID NO: 94636 - protein, 9 aa, synthetic construct
  source 1..9: note = Seed: VVVGAGDVG (KRAS G13D)
VVVNAADVG

SEQ ID NO: 94637 - protein, 9 aa, synthetic construct
  source 1..9: note = Seed: VVVGAGDVG (KRAS G13D)
VVVNAADVI

SEQ ID NO: 94638 - protein, 9 aa, synthetic construct
  source 1..9: note = Seed: VVVGAGDVG (KRAS G13D)
VVVNAADVL

SEQ ID NO: 94639 - protein, 9 aa, synthetic construct
  source 1..9: note = Seed: VVVGAGDVG (KRAS G13D)
VVVNAADVM

SEQ ID NO: 94640 - protein, 9 aa, synthetic construct
  source 1..9: note = Seed: VVVGAGDVG (KRAS G13D)
VVVNAADVN

SEQ ID NO: 94641 - protein, 9 aa, synthetic construct
  source 1..9: note = Seed: VVVGAGDVG (KRAS G13D)
VVVNAADVS

SEQ ID NO: 94642 - protein, 9 aa, synthetic construct
  source 1..9: note = Seed: VVVGAGDVG (KRAS G13D)
VVVNAADVV

SEQ ID NO: 94643 - protein, 9 aa, synthetic construct
  source 1..9: note = Seed: VVVGAGDVG (KRAS G13D)
VVVNAIDVA

SEQ ID NO: 94644 - protein, 9 aa, synthetic construct
  source 1..9: note = Seed: VVVGAGDVG (KRAS G13D)
VVVNAIDVI

SEQ ID NO: 94645 - protein, 9 aa, synthetic construct
  source 1..9: note = Seed: VVVGAGDVG (KRAS G13D)
VVVNAIDVL

SEQ ID NO: 94646 - protein, 9 aa, synthetic construct
  source 1..9: note = Seed: VVVGAGDVG (KRAS G13D)
VVVNAIDVM

SEQ ID NO: 94647 - protein, 9 aa, synthetic construct
  source 1..9: note = Seed: VVVGAGDVG (KRAS G13D)
VVVNAIDVV

SEQ ID NO: 94648 - protein, 9 aa, synthetic construct
  source 1..9: note = Seed: VVVGAGDVG (KRAS G13D)
VVVNALDVA

SEQ ID NO: 94649 - protein, 9 aa, synthetic construct
  source 1..9: note = Seed: VVVGAGDVG (KRAS G13D)
VVVNALDVI

SEQ ID NO: 94650 - protein, 9 aa, synthetic construct
  source 1..9: note = Seed: VVVGAGDVG (KRAS G13D)
VVVNALDVL

SEQ ID NO: 94651 - protein, 9 aa, synthetic construct
  source 1..9: note = Seed: VVVGAGDVG (KRAS G13D)
VVVNALDVM

SEQ ID NO: 94652 - protein, 9 aa, synthetic construct
  source 1..9: note = Seed: VVVGAGDVG (KRAS G13D)
VVVNALDVV

SEQ ID NO: 94653 - protein, 9 aa, synthetic construct
  source 1..9: note = Seed: VVVGAGDVG (KRAS G13D)
VVVNAMDVL

SEQ ID NO: 94654 - protein, 9 aa, synthetic construct
  source 1..9: note = Seed: VVVGAGDVG (KRAS G13D)
VVVNAMDVM

SEQ ID NO: 94655 - protein, 9 aa, synthetic construct
  source 1..9: note = Seed: VVVGAGDVG (KRAS G13D)
VVVNANDVA

SEQ ID NO: 94656 - protein, 9 aa, synthetic construct
  source 1..9: note = Seed: VVVGAGDVG (KRAS G13D)
VVVNANDVI

SEQ ID NO: 94657 - protein, 9 aa, synthetic construct
  source 1..9: note = Seed: VVVGAGDVG (KRAS G13D)
VVVNANDVQ

SEQ ID NO: 94658 - protein, 9 aa, synthetic construct
  source 1..9: note = Seed: VVVGAGDVG (KRAS G13D)
VVVNANDVS

SEQ ID NO: 94659 - protein, 9 aa, synthetic construct
  source 1..9: note = Seed: VVVGAGDVG (KRAS G13D)
VVVNANDVV

SEQ ID NO: 94660 - protein, 9 aa, synthetic construct
  source 1..9: note = Seed: VVVGAGDVG (KRAS G13D)
VVVNASDVA

SEQ ID NO: 94661 - protein, 9 aa, synthetic construct
  source 1..9: note = Seed: VVVGAGDVG (KRAS G13D)
VVVNASDVN

SEQ ID NO: 94662 - protein, 9 aa, synthetic construct
  source 1..9: note = Seed: VVVGAGDVG (KRAS G13D)
VVVNASDVS

SEQ ID NO: 94663 - protein, 9 aa, synthetic construct
  source 1..9: note = Seed: VVVGAGDVG (KRAS G13D)
VVVNATDVA

SEQ ID NO: 94664 - protein, 9 aa, synthetic construct
  source 1..9: note = Seed: VVVGAGDVG (KRAS G13D)
VVVNAVDVA

SEQ ID NO: 94665 - protein, 9 aa, synthetic construct
  source 1..9: note = Seed: VVVGAGDVG (KRAS G13D)
VVVNAVDVI

SEQ ID NO: 94666 - protein, 9 aa, synthetic construct
  source 1..9: note = Seed: VVVGAGDVG (KRAS G13D)
VVVNAVDVL

SEQ ID NO: 94667 - protein, 9 aa, synthetic construct
  source 1..9: note = Seed: VVVGAGDVG (KRAS G13D)
VVVQAADVA

SEQ ID NO: 94668 - protein, 9 aa, synthetic construct
  source 1..9: note = Seed: VVVGAGDVG (KRAS G13D)
VVVQAADVD

SEQ ID NO: 94669 - protein, 9 aa, synthetic construct
  source 1..9: note = Seed: VVVGAGDVG (KRAS G13D)
VVVQAADVE

SEQ ID NO: 94670 - protein, 9 aa, synthetic construct
  source 1..9: note = Seed: VVVGAGDVG (KRAS G13D)
VVVQAADVG

SEQ ID NO: 94671 - protein, 9 aa, synthetic construct
  source 1..9: note = Seed: VVVGAGDVG (KRAS G13D)
VVVQAADVH

SEQ ID NO: 94672 - protein, 9 aa, synthetic construct
  source 1..9: note = Seed: VVVGAGDVG (KRAS G13D)
VVVQAADVI

SEQ ID NO: 94673 - protein, 9 aa, synthetic construct
  source 1..9: note = Seed: VVVGAGDVG (KRAS G13D)
VVVQAADVL

SEQ ID NO: 94674 - protein, 9 aa, synthetic construct
  source 1..9: note = Seed: VVVGAGDVG (KRAS G13D)
VVVQAADVM

SEQ ID NO: 94675 - protein, 9 aa, synthetic construct
  source 1..9: note = Seed: VVVGAGDVG (KRAS G13D)
VVVQAADVN

SEQ ID NO: 94676 - protein, 9 aa, synthetic construct
  source 1..9: note = Seed: VVVGAGDVG (KRAS G13D)
VVVQAADVQ

SEQ ID NO: 94677 - protein, 9 aa, synthetic construct
  source 1..9: note = Seed: VVVGAGDVG (KRAS G13D)
VVVQAADVS

SEQ ID NO: 94678 - protein, 9 aa, synthetic construct
  source 1..9: note = Seed: VVVGAGDVG (KRAS G13D)
VVVQAADVT

SEQ ID NO: 94679 - protein, 9 aa, synthetic construct
  source 1..9: note = Seed: VVVGAGDVG (KRAS G13D)
VVVQAADVV

SEQ ID NO: 94680 - protein, 9 aa, synthetic construct
  source 1..9: note = Seed: VVVGAGDVG (KRAS G13D)
VVVQAGDVA

SEQ ID NO: 94681 - protein, 9 aa, synthetic construct
  source 1..9: note = Seed: VVVGAGDVG (KRAS G13D)
VVVQAIDVA

SEQ ID NO: 94682 - protein, 9 aa, synthetic construct
  source 1..9: note = Seed: VVVGAGDVG (KRAS G13D)
VVVQAIDVM

SEQ ID NO: 94683 - protein, 9 aa, synthetic construct
  source 1..9: note = Seed: VVVGAGDVG (KRAS G13D)
VVVQAIDVN

SEQ ID NO: 94684 - protein, 9 aa, synthetic construct
  source 1..9: note = Seed: VVVGAGDVG (KRAS G13D)
VVVQAIDVS

SEQ ID NO: 94685 - protein, 9 aa, synthetic construct
  source 1..9: note = Seed: VVVGAGDVG (KRAS G13D)
VVVQAIDVT

SEQ ID NO: 94686 - protein, 9 aa, synthetic construct
  source 1..9: note = Seed: VVVGAGDVG (KRAS G13D)
VVVQALDVA

SEQ ID NO: 94687 - protein, 9 aa, synthetic construct
  source 1..9: note = Seed: VVVGAGDVG (KRAS G13D)
VVVQANDVA

SEQ ID NO: 94688 - protein, 9 aa, synthetic construct
  source 1..9: note = Seed: VVVGAGDVG (KRAS G13D)
VVVQANDVC

SEQ ID NO: 94689 - protein, 9 aa, synthetic construct
  source 1..9: note = Seed: VVVGAGDVG (KRAS G13D)
VVVQANDVN

SEQ ID NO: 94690 - protein, 9 aa, synthetic construct
  source 1..9: note = Seed: VVVGAGDVG (KRAS G13D)
VVVQANDVS

SEQ ID NO: 94691 - protein, 9 aa, synthetic construct
  source 1..9: note = Seed: VVVGAGDVG (KRAS G13D)
VVVQAPDVA

SEQ ID NO: 94692 - protein, 9 aa, synthetic construct
  source 1..9: note = Seed: VVVGAGDVG (KRAS G13D)
VVVQAPDVI

SEQ ID NO: 94693 - protein, 9 aa, synthetic construct
  source 1..9: note = Seed: VVVGAGDVG (KRAS G13D)
VVVQAPDVL

SEQ ID NO: 94694 - protein, 9 aa, synthetic construct
  source 1..9: note = Seed: VVVGAGDVG (KRAS G13D)
VVVQAPDVM

SEQ ID NO: 94695 - protein, 9 aa, synthetic construct
  source 1..9: note = Seed: VVVGAGDVG (KRAS G13D)
VVVQAPDVN

SEQ ID NO: 94696 - protein, 9 aa, synthetic construct
  source 1..9: note = Seed: VVVGAGDVG (KRAS G13D)
VVVQAPDVQ

SEQ ID NO: 94697 - protein, 9 aa, synthetic construct
  source 1..9: note = Seed: VVVGAGDVG (KRAS G13D)
VVVQAPDVS

SEQ ID NO: 94698 - protein, 9 aa, synthetic construct
  source 1..9: note = Seed: VVVGAGDVG (KRAS G13D)
VVVQAPDVT

SEQ ID NO: 94699 - protein, 9 aa, synthetic construct
  source 1..9: note = Seed: VVVGAGDVG (KRAS G13D)
VVVQAPDVV

SEQ ID NO: 94700 - protein, 9 aa, synthetic construct
  source 1..9: note = Seed: VVVGAGDVG (KRAS G13D)
VVVQASDVA

SEQ ID NO: 94701 - protein, 9 aa, synthetic construct
  source 1..9: note = Seed: VVVGAGDVG (KRAS G13D)
VVVQASDVG

SEQ ID NO: 94702 - protein, 9 aa, synthetic construct
  source 1..9: note = Seed: VVVGAGDVG (KRAS G13D)
VVVQASDVI

SEQ ID NO: 94703 - protein, 9 aa, synthetic construct
  source 1..9: note = Seed: VVVGAGDVG (KRAS G13D)
VVVQASDVL

SEQ ID NO: 94704 - protein, 9 aa, synthetic construct
  source 1..9: note = Seed: VVVGAGDVG (KRAS G13D)
VVVQASDVM

SEQ ID NO: 94705 - protein, 9 aa, synthetic construct
  source 1..9: note = Seed: VVVGAGDVG (KRAS G13D)
VVVQASDVN

SEQ ID NO: 94706 - protein, 9 aa, synthetic construct
  source 1..9: note = Seed: VVVGAGDVG (KRAS G13D)
VVVQASDVQ

SEQ ID NO: 94707 - protein, 9 aa, synthetic construct
  source 1..9: note = Seed: VVVGAGDVG (KRAS G13D)
VVVQASDVS

SEQ ID NO: 94708 - protein, 9 aa, synthetic construct
  source 1..9: note = Seed: VVVGAGDVG (KRAS G13D)
VVVQASDVT

SEQ ID NO: 94709 - protein, 9 aa, synthetic construct
  source 1..9: note = Seed: VVVGAGDVG (KRAS G13D)
VVVQASDVV

SEQ ID NO: 94710 - protein, 9 aa, synthetic construct
  source 1..9: note = Seed: VVVGAGDVG (KRAS G13D)
VVVQATDVA

SEQ ID NO: 94711 - protein, 9 aa, synthetic construct
  source 1..9: note = Seed: VVVGAGDVG (KRAS G13D)
VVVQATDVH

SEQ ID NO: 94712 - protein, 9 aa, synthetic construct
  source 1..9: note = Seed: VVVGAGDVG (KRAS G13D)
VVVQATDVI

SEQ ID NO: 94713 - protein, 9 aa, synthetic construct
  source 1..9: note = Seed: VVVGAGDVG (KRAS G13D)
VVVQATDVL

SEQ ID NO: 94714 - protein, 9 aa, synthetic construct
  source 1..9: note = Seed: VVVGAGDVG (KRAS G13D)
VVVQATDVM

SEQ ID NO: 94715 - protein, 9 aa, synthetic construct
  source 1..9: note = Seed: VVVGAGDVG (KRAS G13D)
VVVQATDVN

SEQ ID NO: 94716 - protein, 9 aa, synthetic construct
  source 1..9: note = Seed: VVVGAGDVG (KRAS G13D)
VVVQATDVQ

SEQ ID NO: 94717 - protein, 9 aa, synthetic construct
  source 1..9: note = Seed: VVVGAGDVG (KRAS G13D)
VVVQATDVS

SEQ ID NO: 94718 - protein, 9 aa, synthetic construct
  source 1..9: note = Seed: VVVGAGDVG (KRAS G13D)
VVVQATDVT

SEQ ID NO: 94719 - protein, 9 aa, synthetic construct
  source 1..9: note = Seed: VVVGAGDVG (KRAS G13D)
VVVQATDVV

SEQ ID NO: 94720 - protein, 9 aa, synthetic construct
  source 1..9: note = Seed: VVVGAGDVG (KRAS G13D)
VVVQATDVY

SEQ ID NO: 94721 - protein, 9 aa, synthetic construct
  source 1..9: note = Seed: VVVGAGDVG (KRAS G13D)
VVVQAVDVA

SEQ ID NO: 94722 - protein, 9 aa, synthetic construct
  source 1..9: note = Seed: VVVGAGDVG (KRAS G13D)
VVVQAVDVH

SEQ ID NO: 94723 - protein, 9 aa, synthetic construct
  source 1..9: note = Seed: VVVGAGDVG (KRAS G13D)
VVVQAVDVL

SEQ ID NO: 94724 - protein, 9 aa, synthetic construct
  source 1..9: note = Seed: VVVGAGDVG (KRAS G13D)
VVVQAVDVM

SEQ ID NO: 94725 - protein, 9 aa, synthetic construct
  source 1..9: note = Seed: VVVGAGDVG (KRAS G13D)
VVVQAVDVN

SEQ ID NO: 94726 - protein, 9 aa, synthetic construct
  source 1..9: note = Seed: VVVGAGDVG (KRAS G13D)
VVVQAVDVQ

SEQ ID NO: 94727 - protein, 9 aa, synthetic construct
  source 1..9: note = Seed: VVVGAGDVG (KRAS G13D)
VVVQAVDVS

SEQ ID NO: 94728 - protein, 9 aa, synthetic construct
  source 1..9: note = Seed: VVVGAGDVG (KRAS G13D)
VVVQAVDVV

SEQ ID NO: 94729 - protein, 9 aa, synthetic construct
  source 1..9: note = Seed: VVVGAGDVG (KRAS G13D)
VVVRANDVA

SEQ ID NO: 94730 - protein, 9 aa, synthetic construct
  source 1..9: note = Seed: VVVGAGDVG (KRAS G13D)
VVVSAADVA

SEQ ID NO: 94731 - protein, 9 aa, synthetic construct
  source 1..9: note = Seed: VVVGAGDVG (KRAS G13D)
VVVSAADVG

SEQ ID NO: 94732 - protein, 9 aa, synthetic construct
  source 1..9: note = Seed: VVVGAGDVG (KRAS G13D)
VVVSAADVI

SEQ ID NO: 94733 - protein, 9 aa, synthetic construct
  source 1..9: note = Seed: VVVGAGDVG (KRAS G13D)
VVVSAADVL

SEQ ID NO: 94734 - protein, 9 aa, synthetic construct
  source 1..9: note = Seed: VVVGAGDVG (KRAS G13D)
VVVSAADVM

SEQ ID NO: 94735 - protein, 9 aa, synthetic construct
  source 1..9: note = Seed: VVVGAGDVG (KRAS G13D)
VVVSAADVN

SEQ ID NO: 94736 - protein, 9 aa, synthetic construct
  source 1..9: note = Seed: VVVGAGDVG (KRAS G13D)
VVVSAADVQ

SEQ ID NO: 94737 - protein, 9 aa, synthetic construct
  source 1..9: note = Seed: VVVGAGDVG (KRAS G13D)
VVVSAADVS

SEQ ID NO: 94738 - protein, 9 aa, synthetic construct
  source 1..9: note = Seed: VVVGAGDVG (KRAS G13D)
VVVSAADVT

SEQ ID NO: 94739 - protein, 9 aa, synthetic construct
  source 1..9: note = Seed: VVVGAGDVG (KRAS G13D)
VVVSAADVV

SEQ ID NO: 94740 - protein, 9 aa, synthetic construct
  source 1..9: note = Seed: VVVGAGDVG (KRAS G13D)
VVVSAIDVA

SEQ ID NO: 94741 - protein, 9 aa, synthetic construct
  source 1..9: note = Seed: VVVGAGDVG (KRAS G13D)
VVVSAIDVI

SEQ ID NO: 94742 - protein, 9 aa, synthetic construct
  source 1..9: note = Seed: VVVGAGDVG (KRAS G13D)
VVVSAIDVL

SEQ ID NO: 94743 - protein, 9 aa, synthetic construct
  source 1..9: note = Seed: VVVGAGDVG (KRAS G13D)
VVVSAIDVM

SEQ ID NO: 94744 - protein, 9 aa, synthetic construct
  source 1..9: note = Seed: VVVGAGDVG (KRAS G13D)
VVVSAIDVS

SEQ ID NO: 94745 - protein, 9 aa, synthetic construct
  source 1..9: note = Seed: VVVGAGDVG (KRAS G13D)
VVVSALDVA

SEQ ID NO: 94746 - protein, 9 aa, synthetic construct
  source 1..9: note = Seed: VVVGAGDVG (KRAS G13D)
VVVSALDVM

SEQ ID NO: 94747 - protein, 9 aa, synthetic construct
  source 1..9: note = Seed: VVVGAGDVG (KRAS G13D)
VVVSAMDVI

SEQ ID NO: 94748 - protein, 9 aa, synthetic construct
  source 1..9: note = Seed: VVVGAGDVG (KRAS G13D)
VVVSAMDVV

SEQ ID NO: 94749 - protein, 9 aa, synthetic construct
  source 1..9: note = Seed: VVVGAGDVG (KRAS G13D)
VVVSANDVA

SEQ ID NO: 94750 - protein, 9 aa, synthetic construct
  source 1..9: note = Seed: VVVGAGDVG (KRAS G13D)
VVVSANDVG

SEQ ID NO: 94751 - protein, 9 aa, synthetic construct
  source 1..9: note = Seed: VVVGAGDVG (KRAS G13D)
VVVSANDVH

SEQ ID NO: 94752 - protein, 9 aa, synthetic construct
  source 1..9: note = Seed: VVVGAGDVG (KRAS G13D)
VVVSANDVI

SEQ ID NO: 94753 - protein, 9 aa, synthetic construct
  source 1..9: note = Seed: VVVGAGDVG (KRAS G13D)
VVVSANDVL

SEQ ID NO: 94754 - protein, 9 aa, synthetic construct
  source 1..9: note = Seed: VVVGAGDVG (KRAS G13D)
VVVSANDVM

SEQ ID NO: 94755 - protein, 9 aa, synthetic construct
  source 1..9: note = Seed: VVVGAGDVG (KRAS G13D)
VVVSANDVQ

SEQ ID NO: 94756 - protein, 9 aa, synthetic construct
  source 1..9: note = Seed: VVVGAGDVG (KRAS G13D)
VVVSANDVS

SEQ ID NO: 94757 - protein, 9 aa, synthetic construct
  source 1..9: note = Seed: VVVGAGDVG (KRAS G13D)
VVVSAPDVA

SEQ ID NO: 94758 - protein, 9 aa, synthetic construct
  source 1..9: note = Seed: VVVGAGDVG (KRAS G13D)
VVVSAPDVS

SEQ ID NO: 94759 - protein, 9 aa, synthetic construct
  source 1..9: note = Seed: VVVGAGDVG (KRAS G13D)
VVVSAPDVV

SEQ ID NO: 94760 - protein, 9 aa, synthetic construct
  source 1..9: note = Seed: VVVGAGDVG (KRAS G13D)
VVVSASDVA

SEQ ID NO: 94761 - protein, 9 aa, synthetic construct
  source 1..9: note = Seed: VVVGAGDVG (KRAS G13D)
VVVSASDVL

SEQ ID NO: 94762 - protein, 9 aa, synthetic construct
  source 1..9: note = Seed: VVVGAGDVG (KRAS G13D)
VVVSASDVN

SEQ ID NO: 94763 - protein, 9 aa, synthetic construct
  source 1..9: note = Seed: VVVGAGDVG (KRAS G13D)
VVVSASDVS

SEQ ID NO: 94764 - protein, 9 aa, synthetic construct
  source 1..9: note = Seed: VVVGAGDVG (KRAS G13D)
VVVSATDVA

SEQ ID NO: 94765 - protein, 9 aa, synthetic construct
  source 1..9: note = Seed: VVVGAGDVG (KRAS G13D)
VVVSATDVN

SEQ ID NO: 94766 - protein, 9 aa, synthetic construct
  source 1..9: note = Seed: VVVGAGDVG (KRAS G13D)
VVVSATDVQ

SEQ ID NO: 94767 - protein, 9 aa, synthetic construct
  source 1..9: note = Seed: VVVGAGDVG (KRAS G13D)
VVVSATDVS

SEQ ID NO: 94768 - protein, 9 aa, synthetic construct
  source 1..9: note = Seed: VVVGAGDVG (KRAS G13D)
VVVSATDVT

SEQ ID NO: 94769 - protein, 9 aa, synthetic construct
  source 1..9: note = Seed: VVVGAGDVG (KRAS G13D)
VVVSATDVV

SEQ ID NO: 94770 - protein, 9 aa, synthetic construct
  source 1..9: note = Seed: VVVGAGDVG (KRAS G13D)
VVVSAVDVA

SEQ ID NO: 94771 - protein, 9 aa, synthetic construct
  source 1..9: note = Seed: VVVGAGDVG (KRAS G13D)
VVVSAVDVL

SEQ ID NO: 94772 - protein, 9 aa, synthetic construct
  source 1..9: note = Seed: VVVGAGDVG (KRAS G13D)
VVVSAVDVM

SEQ ID NO: 94773 - protein, 9 aa, synthetic construct
  source 1..9: note = Seed: VVVGAGDVG (KRAS G13D)
VVVSAVDVN

SEQ ID NO: 94774 - protein, 9 aa, synthetic construct
  source 1..9: note = Seed: VVVGAGDVG (KRAS G13D)
VVVSAVDVS

SEQ ID NO: 94775 - protein, 9 aa, synthetic construct
  source 1..9: note = Seed: VVVGAGDVG (KRAS G13D)
VVVTAADVA

SEQ ID NO: 94776 - protein, 9 aa, synthetic construct
  source 1..9: note = Seed: VVVGAGDVG (KRAS G13D)
VVVTAADVG

SEQ ID NO: 94777 - protein, 9 aa, synthetic construct
  source 1..9: note = Seed: VVVGAGDVG (KRAS G13D)
VVVTAADVN

SEQ ID NO: 94778 - protein, 9 aa, synthetic construct
  source 1..9: note = Seed: VVVGAGDVG (KRAS G13D)
VVVTAADVQ

SEQ ID NO: 94779 - protein, 9 aa, synthetic construct
  source 1..9: note = Seed: VVVGAGDVG (KRAS G13D)
VVVTAADVS

SEQ ID NO: 94780 - protein, 9 aa, synthetic construct
  source 1..9: note = Seed: VVVGAGDVG (KRAS G13D)
VVVTAADVT

SEQ ID NO: 94781 - protein, 9 aa, synthetic construct
  source 1..9: note = Seed: VVVGAGDVG (KRAS G13D)
VVVTAADVV

SEQ ID NO: 94782 - protein, 9 aa, synthetic construct
  source 1..9: note = Seed: VVVGAGDVG (KRAS G13D)
VVVTANDVA

SEQ ID NO: 94783 - protein, 9 aa, synthetic construct
  source 1..9: note = Seed: VVVGAGDVG (KRAS G13D)
VVVTANDVS

SEQ ID NO: 94784 - protein, 9 aa, synthetic construct
  source 1..9: note = Seed: VVVGAGDVG (KRAS G13D)
VVVTAPDVA

SEQ ID NO: 94785 - protein, 9 aa, synthetic construct
  source 1..9: note = Seed: VVVGAGDVG (KRAS G13D)
VVVTAPDVN

SEQ ID NO: 94786 - protein, 9 aa, synthetic construct
  source 1..9: note = Seed: VVVGAGDVG (KRAS G13D)
VVVTAPDVS

SEQ ID NO: 94787 - protein, 9 aa, synthetic construct
  source 1..9: note = Seed: VVVGAGDVG (KRAS G13D)
VVVTAPDVV

SEQ ID NO: 94788 - protein, 9 aa, synthetic construct
  source 1..9: note = Seed: VVVGAGDVG (KRAS G13D)
VVVTASDVA

SEQ ID NO: 94789 - protein, 9 aa, synthetic construct
  source 1..9: note = Seed: VVVGAGDVG (KRAS G13D)
VVVTASDVN

SEQ ID NO: 94790 - protein, 9 aa, synthetic construct
  source 1..9: note = Seed: VVVGAGDVG (KRAS G13D)
VVVTASDVS

SEQ ID NO: 94791 - protein, 9 aa, synthetic construct
  source 1..9: note = Seed: VVVGAGDVG (KRAS G13D)
VVVTATDVA

SEQ ID NO: 94792 - protein, 9 aa, synthetic construct
  source 1..9: note = Seed: VVVGAGDVG (KRAS G13D)
VVVTATDVN

SEQ ID NO: 94793 - protein, 9 aa, synthetic construct
  source 1..9: note = Seed: VVVGAGDVG (KRAS G13D)
VVVTATDVS

SEQ ID NO: 94794 - protein, 9 aa, synthetic construct
  source 1..9: note = Seed: VVVGAGDVG (KRAS G13D)
VVVTAVDVA

SEQ ID NO: 94795 - protein, 9 aa, synthetic construct
  source 1..9: note = Seed: VVVGAGDVG (KRAS G13D)
VVVVAADVA

SEQ ID NO: 94796 - protein, 9 aa, synthetic construct
  source 1..9: note = Seed: VVVGAGDVG (KRAS G13D)
VVVVAADVN

SEQ ID NO: 94797 - protein, 9 aa, synthetic construct
  source 1..9: note = Seed: VVVGAGDVG (KRAS G13D)
VVVVAADVQ

SEQ ID NO: 94798 - protein, 9 aa, synthetic construct
  source 1..9: note = Seed: VVVGAGDVG (KRAS G13D)
VVVVAADVS

SEQ ID NO: 94799 - protein, 9 aa, synthetic construct
  source 1..9: note = Seed: VVVGAGDVG (KRAS G13D)
VVVVANDVA

SEQ ID NO: 94800 - protein, 9 aa, synthetic construct
  source 1..9: note = Seed: VVVGAGDVG (KRAS G13D)
VVVVANDVG

SEQ ID NO: 94801 - protein, 9 aa, synthetic construct
  source 1..9: note = Seed: VVVGAGDVG (KRAS G13D)
VVVVANDVH

SEQ ID NO: 94802 - protein, 9 aa, synthetic construct
  source 1..9: note = Seed: VVVGAGDVG (KRAS G13D)
VVVVANDVN

SEQ ID NO: 94803 - protein, 9 aa, synthetic construct
  source 1..9: note = Seed: VVVGAGDVG (KRAS G13D)
VVVVANDVQ

SEQ ID NO: 94804 - protein, 9 aa, synthetic construct
  source 1..9: note = Seed: VVVGAGDVG (KRAS G13D)
VVVVANDVS

SEQ ID NO: 94805 - protein, 9 aa, synthetic construct
  source 1..9: note = Seed: VVVGAGDVG (KRAS G13D)
VVVVANDVT

SEQ ID NO: 94806 - protein, 9 aa, synthetic construct
  source 1..9: note = Seed: VVVGAGDVG (KRAS G13D)
VVVVANDVV

SEQ ID NO: 94807 - protein, 9 aa, synthetic construct
  source 1..9: note = Seed: VVVGAGDVG (KRAS G13D)
VVVVAPDVA

SEQ ID NO: 94808 - protein, 9 aa, synthetic construct
  source 1..9: note = Seed: VVVGAGDVG (KRAS G13D)
VVVVAPDVN

SEQ ID NO: 94809 - protein, 9 aa, synthetic construct
  source 1..9: note = Seed: VVVGAGDVG (KRAS G13D)
VVVVAPDVS

SEQ ID NO: 94810 - protein, 9 aa, synthetic construct
  source 1..9: note = Seed: VVVGAGDVG (KRAS G13D)
VVVVASDVA

SEQ ID NO: 94811 - protein, 9 aa, synthetic construct
  source 1..9: note = Seed: VVVGAGDVG (KRAS G13D)
VVVVASDVN

SEQ ID NO: 94812 - protein, 9 aa, synthetic construct
  source 1..9: note = Seed: VVVGAGDVG (KRAS G13D)
VVVVASDVS

SEQ ID NO: 94813 - protein, 9 aa, synthetic construct
  source 1..9: note = Seed: VVVGAGDVG (KRAS G13D)
VVVVATDVA

SEQ ID NO: 94814 - protein, 9 aa, synthetic construct
  source 1..9: note = Seed: VVVGAGDVG (KRAS G13D)
VVVVATDVS

SEQ ID NO: 94815 - protein, 9 aa, synthetic construct
  source 1..9: note = Seed: VVVGAGDVG (KRAS G13D)
VVVWAADVA

SEQ ID NO: 94816 - protein, 9 aa, synthetic construct
  source 1..9: note = Seed: VVVGAGDVG (KRAS G13D)
VVVWAADVE

SEQ ID NO: 94817 - protein, 9 aa, synthetic construct
  source 1..9: note = Seed: VVVGAGDVG (KRAS G13D)
VVVWAADVF

SEQ ID NO: 94818 - protein, 9 aa, synthetic construct
  source 1..9: note = Seed: VVVGAGDVG (KRAS G13D)
VVVWAADVI

SEQ ID NO: 94819 - protein, 9 aa, synthetic construct
  source 1..9: note = Seed: VVVGAGDVG (KRAS G13D)
VVVWAADVL

SEQ ID NO: 94820 - protein, 9 aa, synthetic construct
  source 1..9: note = Seed: VVVGAGDVG (KRAS G13D)
VVVWAADVM

SEQ ID NO: 94821 - protein, 9 aa, synthetic construct
  source 1..9: note = Seed: VVVGAGDVG (KRAS G13D)
VVVWAADVN

SEQ ID NO: 94822 - protein, 9 aa, synthetic construct
  source 1..9: note = Seed: VVVGAGDVG (KRAS G13D)
VVVWAADVP

SEQ ID NO: 94823 - protein, 9 aa, synthetic construct
  source 1..9: note = Seed: VVVGAGDVG (KRAS G13D)
VVVWAADVQ

SEQ ID NO: 94824 - protein, 9 aa, synthetic construct
  source 1..9: note = Seed: VVVGAGDVG (KRAS G13D)
VVVWAADVR

SEQ ID NO: 94825 - protein, 9 aa, synthetic construct
  source 1..9: note = Seed: VVVGAGDVG (KRAS G13D)
VVVWAADVS

SEQ ID NO: 94826 - protein, 9 aa, synthetic construct
  source 1..9: note = Seed: VVVGAGDVG (KRAS G13D)
VVVWAADVT

SEQ ID NO: 94827 - protein, 9 aa, synthetic construct
  source 1..9: note = Seed: VVVGAGDVG (KRAS G13D)
VVVWAADVV

SEQ ID NO: 94828 - protein, 9 aa, synthetic construct
  source 1..9: note = Seed: VVVGAGDVG (KRAS G13D)
VVVWAADVW

SEQ ID NO: 94829 - protein, 9 aa, synthetic construct
  source 1..9: note = Seed: VVVGAGDVG (KRAS G13D)
VVVWAADVY

SEQ ID NO: 94830 - protein, 9 aa, synthetic construct
  source 1..9: note = Seed: VVVGAGDVG (KRAS G13D)
VVVWADDVA

SEQ ID NO: 94831 - protein, 9 aa, synthetic construct
  source 1..9: note = Seed: VVVGAGDVG (KRAS G13D)
VVVWADDVC

SEQ ID NO: 94832 - protein, 9 aa, synthetic construct
  source 1..9: note = Seed: VVVGAGDVG (KRAS G13D)
VVVWADDVE

SEQ ID NO: 94833 - protein, 9 aa, synthetic construct
  source 1..9: note = Seed: VVVGAGDVG (KRAS G13D)
VVVWADDVF

SEQ ID NO: 94834 - protein, 9 aa, synthetic construct
  source 1..9: note = Seed: VVVGAGDVG (KRAS G13D)
VVVWADDVG

SEQ ID NO: 94835 - protein, 9 aa, synthetic construct
  source 1..9: note = Seed: VVVGAGDVG (KRAS G13D)
VVVWADDVH

SEQ ID NO: 94836 - protein, 9 aa, synthetic construct
  source 1..9: note = Seed: VVVGAGDVG (KRAS G13D)
VVVWADDVI

SEQ ID NO: 94837 - protein, 9 aa, synthetic construct
  source 1..9: note = Seed: VVVGAGDVG (KRAS G13D)
VVVWADDVL

SEQ ID NO: 94838 - protein, 9 aa, synthetic construct
  source 1..9: note = Seed: VVVGAGDVG (KRAS G13D)
VVVWADDVM

SEQ ID NO: 94839 - protein, 9 aa, synthetic construct
  source 1..9: note = Seed: VVVGAGDVG (KRAS G13D)
VVVWADDVN

SEQ ID NO: 94840 - protein, 9 aa, synthetic construct
  source 1..9: note = Seed: VVVGAGDVG (KRAS G13D)
VVVWADDVP

SEQ ID NO: 94841 - protein, 9 aa, synthetic construct
  source 1..9: note = Seed: VVVGAGDVG (KRAS G13D)
VVVWADDVQ

SEQ ID NO: 94842 - protein, 9 aa, synthetic construct
  source 1..9: note = Seed: VVVGAGDVG (KRAS G13D)
VVVWADDVR

SEQ ID NO: 94843 - protein, 9 aa, synthetic construct
  source 1..9: note = Seed: VVVGAGDVG (KRAS G13D)
VVVWADDVS

SEQ ID NO: 94844 - protein, 9 aa, synthetic construct
  source 1..9: note = Seed: VVVGAGDVG (KRAS G13D)
VVVWADDVT

SEQ ID NO: 94845 - protein, 9 aa, synthetic construct
  source 1..9: note = Seed: VVVGAGDVG (KRAS G13D)
VVVWADDVV

SEQ ID NO: 94846 - protein, 9 aa, synthetic construct
  source 1..9: note = Seed: VVVGAGDVG (KRAS G13D)
VVVWADDVW

SEQ ID NO: 94847 - protein, 9 aa, synthetic construct
  source 1..9: note = Seed: VVVGAGDVG (KRAS G13D)
VVVWADDVY

SEQ ID NO: 94848 - protein, 9 aa, synthetic construct
  source 1..9: note = Seed: VVVGAGDVG (KRAS G13D)
VVVWAEDVA

SEQ ID NO: 94849 - protein, 9 aa, synthetic construct
  source 1..9: note = Seed: VVVGAGDVG (KRAS G13D)
VVVWAEDVF

SEQ ID NO: 94850 - protein, 9 aa, synthetic construct
  source 1..9: note = Seed: VVVGAGDVG (KRAS G13D)
VVVWAEDVI

SEQ ID NO: 94851 - protein, 9 aa, synthetic construct
  source 1..9: note = Seed: VVVGAGDVG (KRAS G13D)
VVVWAEDVL

SEQ ID NO: 94852 - protein, 9 aa, synthetic construct
  source 1..9: note = Seed: VVVGAGDVG (KRAS G13D)
VVVWAEDVM

SEQ ID NO: 94853 - protein, 9 aa, synthetic construct
  source 1..9: note = Seed: VVVGAGDVG (KRAS G13D)
VVVWAEDVR

SEQ ID NO: 94854 - protein, 9 aa, synthetic construct
  source 1..9: note = Seed: VVVGAGDVG (KRAS G13D)
VVVWAEDVS

SEQ ID NO: 94855 - protein, 9 aa, synthetic construct
  source 1..9: note = Seed: VVVGAGDVG (KRAS G13D)
VVVWAEDVV

SEQ ID NO: 94856 - protein, 9 aa, synthetic construct
  source 1..9: note = Seed: VVVGAGDVG (KRAS G13D)
VVVWAEDVW

SEQ ID NO: 94857 - protein, 9 aa, synthetic construct
  source 1..9: note = Seed: VVVGAGDVG (KRAS G13D)
VVVWAEDVY

SEQ ID NO: 94858 - protein, 9 aa, synthetic construct
  source 1..9: note = Seed: VVVGAGDVG (KRAS G13D)
VVVWAGDVA

SEQ ID NO: 94859 - protein, 9 aa, synthetic construct
  source 1..9: note = Seed: VVVGAGDVG (KRAS G13D)
VVVWAGDVI

SEQ ID NO: 94860 - protein, 9 aa, synthetic construct
  source 1..9: note = Seed: VVVGAGDVG (KRAS G13D)
VVVWAGDVL

SEQ ID NO: 94861 - protein, 9 aa, synthetic construct
  source 1..9: note = Seed: VVVGAGDVG (KRAS G13D)
VVVWAGDVM

SEQ ID NO: 94862 - protein, 9 aa, synthetic construct
  source 1..9: note = Seed: VVVGAGDVG (KRAS G13D)
VVVWAGDVV

SEQ ID NO: 94863 - protein, 9 aa, synthetic construct
  source 1..9: note = Seed: VVVGAGDVG (KRAS G13D)
VVVWAHDVA

SEQ ID NO: 94864 - protein, 9 aa, synthetic construct
  source 1..9: note = Seed: VVVGAGDVG (KRAS G13D)
VVVWAHDVI

SEQ ID NO: 94865 - protein, 9 aa, synthetic construct
  source 1..9: note = Seed: VVVGAGDVG (KRAS G13D)
VVVWAHDVL

SEQ ID NO: 94866 - protein, 9 aa, synthetic construct
  source 1..9: note = Seed: VVVGAGDVG (KRAS G13D)
VVVWAHDVM

SEQ ID NO: 94867 - protein, 9 aa, synthetic construct
  source 1..9: note = Seed: VVVGAGDVG (KRAS G13D)
VVVWAHDVS

SEQ ID NO: 94868 - protein, 9 aa, synthetic construct
  source 1..9: note = Seed: VVVGAGDVG (KRAS G13D)
VVVWAHDVV

SEQ ID NO: 94869 - protein, 9 aa, synthetic construct
  source 1..9: note = Seed: VVVGAGDVG (KRAS G13D)
VVVWAHDVY

SEQ ID NO: 94870 - protein, 9 aa, synthetic construct
  source 1..9: note = Seed: VVVGAGDVG (KRAS G13D)
VVVWAIDVA

SEQ ID NO: 94871 - protein, 9 aa, synthetic construct
  source 1..9: note = Seed: VVVGAGDVG (KRAS G13D)
VVVWAIDVE

SEQ ID NO: 94872 - protein, 9 aa, synthetic construct
  source 1..9: note = Seed: VVVGAGDVG (KRAS G13D)
VVVWAIDVF

SEQ ID NO: 94873 - protein, 9 aa, synthetic construct
  source 1..9: note = Seed: VVVGAGDVG (KRAS G13D)
VVVWAIDVI

SEQ ID NO: 94874 - protein, 9 aa, synthetic construct
  source 1..9: note = Seed: VVVGAGDVG (KRAS G13D)
VVVWAIDVL

SEQ ID NO: 94875 - protein, 9 aa, synthetic construct
  source 1..9: note = Seed: VVVGAGDVG (KRAS G13D)
VVVWAIDVM

SEQ ID NO: 94876 - protein, 9 aa, synthetic construct
  source 1..9: note = Seed: VVVGAGDVG (KRAS G13D)
VVVWAIDVN

SEQ ID NO: 94877 - protein, 9 aa, synthetic construct
  source 1..9: note = Seed: VVVGAGDVG (KRAS G13D)
VVVWAIDVQ

SEQ ID NO: 94878 - protein, 9 aa, synthetic construct
  source 1..9: note = Seed: VVVGAGDVG (KRAS G13D)
VVVWAIDVS

SEQ ID NO: 94879 - protein, 9 aa, synthetic construct
  source 1..9: note = Seed: VVVGAGDVG (KRAS G13D)
VVVWAIDVV

SEQ ID NO: 94880 - protein, 9 aa, synthetic construct
  source 1..9: note = Seed: VVVGAGDVG (KRAS G13D)
VVVWAIDVY

SEQ ID NO: 94881 - protein, 9 aa, synthetic construct
  source 1..9: note = Seed: VVVGAGDVG (KRAS G13D)
VVVWALDVA

SEQ ID NO: 94882 - protein, 9 aa, synthetic construct
  source 1..9: note = Seed: VVVGAGDVG (KRAS G13D)
VVVWALDVI

SEQ ID NO: 94883 - protein, 9 aa, synthetic construct
  source 1..9: note = Seed: VVVGAGDVG (KRAS G13D)
VVVWALDVL

SEQ ID NO: 94884 - protein, 9 aa, synthetic construct
  source 1..9: note = Seed: VVVGAGDVG (KRAS G13D)
VVVWALDVM

SEQ ID NO: 94885 - protein, 9 aa, synthetic construct
  source 1..9: note = Seed: VVVGAGDVG (KRAS G13D)
VVVWALDVP

SEQ ID NO: 94886 - protein, 9 aa, synthetic construct
  source 1..9: note = Seed: VVVGAGDVG (KRAS G13D)
VVVWALDVV

SEQ ID NO: 94887 - protein, 9 aa, synthetic construct
  source 1..9: note = Seed: VVVGAGDVG (KRAS G13D)
VVVWALDVY

SEQ ID NO: 94888 - protein, 9 aa, synthetic construct
  source 1..9: note = Seed: VVVGAGDVG (KRAS G13D)
VVVWAMDVA

SEQ ID NO: 94889 - protein, 9 aa, synthetic construct
  source 1..9: note = Seed: VVVGAGDVG (KRAS G13D)
VVVWAMDVF

SEQ ID NO: 94890 - protein, 9 aa, synthetic construct
  source 1..9: note = Seed: VVVGAGDVG (KRAS G13D)
VVVWAMDVI

SEQ ID NO: 94891 - protein, 9 aa, synthetic construct
  source 1..9: note = Seed: VVVGAGDVG (KRAS G13D)
VVVWAMDVL

SEQ ID NO: 94892 - protein, 9 aa, synthetic construct
  source 1..9: note = Seed: VVVGAGDVG (KRAS G13D)
VVVWAMDVM

SEQ ID NO: 94893 - protein, 9 aa, synthetic construct
  source 1..9: note = Seed: VVVGAGDVG (KRAS G13D)
VVVWAMDVN

SEQ ID NO: 94894 - protein, 9 aa, synthetic construct
  source 1..9: note = Seed: VVVGAGDVG (KRAS G13D)
VVVWAMDVQ

SEQ ID NO: 94895 - protein, 9 aa, synthetic construct
  source 1..9: note = Seed: VVVGAGDVG (KRAS G13D)
VVVWAMDVR

SEQ ID NO: 94896 - protein, 9 aa, synthetic construct
  source 1..9: note = Seed: VVVGAGDVG (KRAS G13D)
VVVWAMDVS

SEQ ID NO: 94897 - protein, 9 aa, synthetic construct
  source 1..9: note = Seed: VVVGAGDVG (KRAS G13D)
VVVWAMDVV

SEQ ID NO: 94898 - protein, 9 aa, synthetic construct
  source 1..9: note = Seed: VVVGAGDVG (KRAS G13D)
VVVWAMDVY

SEQ ID NO: 94899 - protein, 9 aa, synthetic construct
  source 1..9: note = Seed: VVVGAGDVG (KRAS G13D)
VVVWANDVA

SEQ ID NO: 94900 - protein, 9 aa, synthetic construct
  source 1..9: note = Seed: VVVGAGDVG (KRAS G13D)
VVVWANDVC

SEQ ID NO: 94901 - protein, 9 aa, synthetic construct
  source 1..9: note = Seed: VVVGAGDVG (KRAS G13D)
VVVWANDVD

SEQ ID NO: 94902 - protein, 9 aa, synthetic construct
  source 1..9: note = Seed: VVVGAGDVG (KRAS G13D)
VVVWANDVE

SEQ ID NO: 94903 - protein, 9 aa, synthetic construct
  source 1..9: note = Seed: VVVGAGDVG (KRAS G13D)
VVVWANDVF

SEQ ID NO: 94904 - protein, 9 aa, synthetic construct
  source 1..9: note = Seed: VVVGAGDVG (KRAS G13D)
VVVWANDVG

SEQ ID NO: 94905 - protein, 9 aa, synthetic construct
  source 1..9: note = Seed: VVVGAGDVG (KRAS G13D)
VVVWANDVH

SEQ ID NO: 94906 - protein, 9 aa, synthetic construct
  source 1..9: note = Seed: VVVGAGDVG (KRAS G13D)
VVVWANDVI

SEQ ID NO: 94907 - protein, 9 aa, synthetic construct
  source 1..9: note = Seed: VVVGAGDVG (KRAS G13D)
VVVWANDVK

SEQ ID NO: 94908 - protein, 9 aa, synthetic construct
  source 1..9: note = Seed: VVVGAGDVG (KRAS G13D)
VVVWANDVL

SEQ ID NO: 94909 - protein, 9 aa, synthetic construct
  source 1..9: note = Seed: VVVGAGDVG (KRAS G13D)
VVVWANDVM

SEQ ID NO: 94910 - protein, 9 aa, synthetic construct
  source 1..9: note = Seed: VVVGAGDVG (KRAS G13D)
VVVWANDVN

SEQ ID NO: 94911 - protein, 9 aa, synthetic construct
  source 1..9: note = Seed: VVVGAGDVG (KRAS G13D)
VVVWANDVQ

SEQ ID NO: 94912 - protein, 9 aa, synthetic construct
  source 1..9: note = Seed: VVVGAGDVG (KRAS G13D)
VVVWANDVR

SEQ ID NO: 94913 - protein, 9 aa, synthetic construct
  source 1..9: note = Seed: VVVGAGDVG (KRAS G13D)
VVVWANDVS

SEQ ID NO: 94914 - protein, 9 aa, synthetic construct
  source 1..9: note = Seed: VVVGAGDVG (KRAS G13D)
VVVWANDVT

SEQ ID NO: 94915 - protein, 9 aa, synthetic construct
  source 1..9: note = Seed: VVVGAGDVG (KRAS G13D)
VVVWANDVV

SEQ ID NO: 94916 - protein, 9 aa, synthetic construct
  source 1..9: note = Seed: VVVGAGDVG (KRAS G13D)
VVVWANDVW

SEQ ID NO: 94917 - protein, 9 aa, synthetic construct
  source 1..9: note = Seed: VVVGAGDVG (KRAS G13D)
VVVWANDVY

SEQ ID NO: 94918 - protein, 9 aa, synthetic construct
  source 1..9: note = Seed: VVVGAGDVG (KRAS G13D)
VVVWAPDVA

SEQ ID NO: 94919 - protein, 9 aa, synthetic construct
  source 1..9: note = Seed: VVVGAGDVG (KRAS G13D)
VVVWAPDVC

SEQ ID NO: 94920 - protein, 9 aa, synthetic construct
  source 1..9: note = Seed: VVVGAGDVG (KRAS G13D)
VVVWAPDVD

SEQ ID NO: 94921 - protein, 9 aa, synthetic construct
  source 1..9: note = Seed: VVVGAGDVG (KRAS G13D)
VVVWAPDVE

SEQ ID NO: 94922 - protein, 9 aa, synthetic construct
  source 1..9: note = Seed: VVVGAGDVG (KRAS G13D)
VVVWAPDVF

SEQ ID NO: 94923 - protein, 9 aa, synthetic construct
  source 1..9: note = Seed: VVVGAGDVG (KRAS G13D)
VVVWAPDVG

SEQ ID NO: 94924 - protein, 9 aa, synthetic construct
  source 1..9: note = Seed: VVVGAGDVG (KRAS G13D)
VVVWAPDVH

SEQ ID NO: 94925 - protein, 9 aa, synthetic construct
  source 1..9: note = Seed: VVVGAGDVG (KRAS G13D)
VVVWAPDVI

SEQ ID NO: 94926 - protein, 9 aa, synthetic construct
  source 1..9: note = Seed: VVVGAGDVG (KRAS G13D)
VVVWAPDVL

SEQ ID NO: 94927 - protein, 9 aa, synthetic construct
  source 1..9: note = Seed: VVVGAGDVG (KRAS G13D)
VVVWAPDVM

SEQ ID NO: 94928 - protein, 9 aa, synthetic construct
  source 1..9: note = Seed: VVVGAGDVG (KRAS G13D)
VVVWAPDVN

SEQ ID NO: 94929 - protein, 9 aa, synthetic construct
  source 1..9: note = Seed: VVVGAGDVG (KRAS G13D)
VVVWAPDVQ

SEQ ID NO: 94930 - protein, 9 aa, synthetic construct
  source 1..9: note = Seed: VVVGAGDVG (KRAS G13D)
VVVWAPDVR

SEQ ID NO: 94931 - protein, 9 aa, synthetic construct
  source 1..9: note = Seed: VVVGAGDVG (KRAS G13D)
VVVWAPDVS

SEQ ID NO: 94932 - protein, 9 aa, synthetic construct
  source 1..9: note = Seed: VVVGAGDVG (KRAS G13D)
VVVWAPDVT

SEQ ID NO: 94933 - protein, 9 aa, synthetic construct
  source 1..9: note = Seed: VVVGAGDVG (KRAS G13D)
VVVWAPDVV

SEQ ID NO: 94934 - protein, 9 aa, synthetic construct
  source 1..9: note = Seed: VVVGAGDVG (KRAS G13D)
VVVWAPDVW

SEQ ID NO: 94935 - protein, 9 aa, synthetic construct
  source 1..9: note = Seed: VVVGAGDVG (KRAS G13D)
VVVWAPDVY

SEQ ID NO: 94936 - protein, 9 aa, synthetic construct
  source 1..9: note = Seed: VVVGAGDVG (KRAS G13D)
VVVWAQDVA

SEQ ID NO: 94937 - protein, 9 aa, synthetic construct
  source 1..9: note = Seed: VVVGAGDVG (KRAS G13D)
VVVWAQDVF

SEQ ID NO: 94938 - protein, 9 aa, synthetic construct
  source 1..9: note = Seed: VVVGAGDVG (KRAS G13D)
VVVWAQDVH

SEQ ID NO: 94939 - protein, 9 aa, synthetic construct
  source 1..9: note = Seed: VVVGAGDVG (KRAS G13D)
VVVWAQDVI

SEQ ID NO: 94940 - protein, 9 aa, synthetic construct
  source 1..9: note = Seed: VVVGAGDVG (KRAS G13D)
VVVWAQDVL

SEQ ID NO: 94941 - protein, 9 aa, synthetic construct
  source 1..9: note = Seed: VVVGAGDVG (KRAS G13D)
VVVWAQDVM

SEQ ID NO: 94942 - protein, 9 aa, synthetic construct
  source 1..9: note = Seed: VVVGAGDVG (KRAS G13D)
VVVWAQDVN

SEQ ID NO: 94943 - protein, 9 aa, synthetic construct
  source 1..9: note = Seed: VVVGAGDVG (KRAS G13D)
VVVWAQDVQ

SEQ ID NO: 94944 - protein, 9 aa, synthetic construct
  source 1..9: note = Seed: VVVGAGDVG (KRAS G13D)
VVVWAQDVS

SEQ ID NO: 94945 - protein, 9 aa, synthetic construct
  source 1..9: note = Seed: VVVGAGDVG (KRAS G13D)
VVVWAQDVV

SEQ ID NO: 94946 - protein, 9 aa, synthetic construct
  source 1..9: note = Seed: VVVGAGDVG (KRAS G13D)
VVVWAQDVY

SEQ ID NO: 94947 - protein, 9 aa, synthetic construct
  source 1..9: note = Seed: VVVGAGDVG (KRAS G13D)
VVVWARDVA

SEQ ID NO: 94948 - protein, 9 aa, synthetic construct
  source 1..9: note = Seed: VVVGAGDVG (KRAS G13D)
VVVWARDVL

SEQ ID NO: 94949 - protein, 9 aa, synthetic construct
  source 1..9: note = Seed: VVVGAGDVG (KRAS G13D)
VVVWARDVM

SEQ ID NO: 94950 - protein, 9 aa, synthetic construct
  source 1..9: note = Seed: VVVGAGDVG (KRAS G13D)
VVVWARDVV

SEQ ID NO: 94951 - protein, 9 aa, synthetic construct
  source 1..9: note = Seed: VVVGAGDVG (KRAS G13D)
VVVWASDVA

SEQ ID NO: 94952 - protein, 9 aa, synthetic construct
  source 1..9: note = Seed: VVVGAGDVG (KRAS G13D)
VVVWASDVF

SEQ ID NO: 94953 - protein, 9 aa, synthetic construct
  source 1..9: note = Seed: VVVGAGDVG (KRAS G13D)
VVVWASDVI

SEQ ID NO: 94954 - protein, 9 aa, synthetic construct
  source 1..9: note = Seed: VVVGAGDVG (KRAS G13D)
VVVWASDVL

SEQ ID NO: 94955 - protein, 9 aa, synthetic construct
  source 1..9: note = Seed: VVVGAGDVG (KRAS G13D)
VVVWASDVM

SEQ ID NO: 94956 - protein, 9 aa, synthetic construct
  source 1..9: note = Seed: VVVGAGDVG (KRAS G13D)
VVVWASDVN

SEQ ID NO: 94957 - protein, 9 aa, synthetic construct
  source 1..9: note = Seed: VVVGAGDVG (KRAS G13D)
VVVWASDVP

SEQ ID NO: 94958 - protein, 9 aa, synthetic construct
  source 1..9: note = Seed: VVVGAGDVG (KRAS G13D)
VVVWASDVQ

SEQ ID NO: 94959 - protein, 9 aa, synthetic construct
  source 1..9: note = Seed: VVVGAGDVG (KRAS G13D)
VVVWASDVR

SEQ ID NO: 94960 - protein, 9 aa, synthetic construct
  source 1..9: note = Seed: VVVGAGDVG (KRAS G13D)
VVVWASDVS

SEQ ID NO: 94961 - protein, 9 aa, synthetic construct
  source 1..9: note = Seed: VVVGAGDVG (KRAS G13D)
VVVWASDVT

SEQ ID NO: 94962 - protein, 9 aa, synthetic construct
  source 1..9: note = Seed: VVVGAGDVG (KRAS G13D)
VVVWASDVV

SEQ ID NO: 94963 - protein, 9 aa, synthetic construct
  source 1..9: note = Seed: VVVGAGDVG (KRAS G13D)
VVVWASDVW

SEQ ID NO: 94964 - protein, 9 aa, synthetic construct
  source 1..9: note = Seed: VVVGAGDVG (KRAS G13D)
VVVWASDVY

SEQ ID NO: 94965 - protein, 9 aa, synthetic construct
  source 1..9: note = Seed: VVVGAGDVG (KRAS G13D)
VVVWATDVA

SEQ ID NO: 94966 - protein, 9 aa, synthetic construct
  source 1..9: note = Seed: VVVGAGDVG (KRAS G13D)
VVVWATDVF

SEQ ID NO: 94967 - protein, 9 aa, synthetic construct
  source 1..9: note = Seed: VVVGAGDVG (KRAS G13D)
VVVWATDVI

SEQ ID NO: 94968 - protein, 9 aa, synthetic construct
  source 1..9: note = Seed: VVVGAGDVG (KRAS G13D)
VVVWATDVL

SEQ ID NO: 94969 - protein, 9 aa, synthetic construct
  source 1..9: note = Seed: VVVGAGDVG (KRAS G13D)
VVVWATDVM

SEQ ID NO: 94970 - protein, 9 aa, synthetic construct
  source 1..9: note = Seed: VVVGAGDVG (KRAS G13D)
VVVWATDVQ

SEQ ID NO: 94971 - protein, 9 aa, synthetic construct
  source 1..9: note = Seed: VVVGAGDVG (KRAS G13D)
VVVWATDVS

SEQ ID NO: 94972 - protein, 9 aa, synthetic construct
  source 1..9: note = Seed: VVVGAGDVG (KRAS G13D)
VVVWATDVT

SEQ ID NO: 94973 - protein, 9 aa, synthetic construct
  source 1..9: note = Seed: VVVGAGDVG (KRAS G13D)
VVVWATDVV

SEQ ID NO: 94974 - protein, 9 aa, synthetic construct
  source 1..9: note = Seed: VVVGAGDVG (KRAS G13D)
VVVWATDVY

SEQ ID NO: 94975 - protein, 9 aa, synthetic construct
  source 1..9: note = Seed: VVVGAGDVG (KRAS G13D)
VVVWAVDVA

SEQ ID NO: 94976 - protein, 9 aa, synthetic construct
  source 1..9: note = Seed: VVVGAGDVG (KRAS G13D)
VVVWAVDVF

SEQ ID NO: 94977 - protein, 9 aa, synthetic construct
  source 1..9: note = Seed: VVVGAGDVG (KRAS G13D)
VVVWAVDVI

SEQ ID NO: 94978 - protein, 9 aa, synthetic construct
  source 1..9: note = Seed: VVVGAGDVG (KRAS G13D)
VVVWAVDVL

SEQ ID NO: 94979 - protein, 9 aa, synthetic construct
  source 1..9: note = Seed: VVVGAGDVG (KRAS G13D)
VVVWAVDVM

SEQ ID NO: 94980 - protein, 9 aa, synthetic construct
  source 1..9: note = Seed: VVVGAGDVG (KRAS G13D)
VVVWAVDVS

SEQ ID NO: 94981 - protein, 9 aa, synthetic construct
  source 1..9: note = Seed: VVVGAGDVG (KRAS G13D)
VVVWAVDVV

SEQ ID NO: 94982 - protein, 9 aa, synthetic construct
  source 1..9: note = Seed: VVVGAGDVG (KRAS G13D)
VVVWAVDVY

SEQ ID NO: 94983 - protein, 9 aa, synthetic construct
  source 1..9: note = Seed: VVVGAGDVG (KRAS G13D)
VVVYAADVA

SEQ ID NO: 94984 - protein, 9 aa, synthetic construct
  source 1..9: note = Seed: VVVGAGDVG (KRAS G13D)
VVVYAADVF

SEQ ID NO: 94985 - protein, 9 aa, synthetic construct
  source 1..9: note = Seed: VVVGAGDVG (KRAS G13D)
VVVYAADVI

SEQ ID NO: 94986 - protein, 9 aa, synthetic construct
  source 1..9: note = Seed: VVVGAGDVG (KRAS G13D)
VVVYAADVL

SEQ ID NO: 94987 - protein, 9 aa, synthetic construct
  source 1..9: note = Seed: VVVGAGDVG (KRAS G13D)
VVVYAADVM

SEQ ID NO: 94988 - protein, 9 aa, synthetic construct
  source 1..9: note = Seed: VVVGAGDVG (KRAS G13D)
VVVYAADVN

SEQ ID NO: 94989 - protein, 9 aa, synthetic construct
  source 1..9: note = Seed: VVVGAGDVG (KRAS G13D)
VVVYAADVQ

SEQ ID NO: 94990 - protein, 9 aa, synthetic construct
  source 1..9: note = Seed: VVVGAGDVG (KRAS G13D)
VVVYAADVR

SEQ ID NO: 94991 - protein, 9 aa, synthetic construct
  source 1..9: note = Seed: VVVGAGDVG (KRAS G13D)
VVVYAADVS

SEQ ID NO: 94992 - protein, 9 aa, synthetic construct
  source 1..9: note = Seed: VVVGAGDVG (KRAS G13D)
VVVYAADVV

SEQ ID NO: 94993 - protein, 9 aa, synthetic construct
  source 1..9: note = Seed: VVVGAGDVG (KRAS G13D)
VVVYAADVY

SEQ ID NO: 94994 - protein, 9 aa, synthetic construct
  source 1..9: note = Seed: VVVGAGDVG (KRAS G13D)
VVVYADDVA

SEQ ID NO: 94995 - protein, 9 aa, synthetic construct
  source 1..9: note = Seed: VVVGAGDVG (KRAS G13D)
VVVYADDVF

SEQ ID NO: 94996 - protein, 9 aa, synthetic construct
  source 1..9: note = Seed: VVVGAGDVG (KRAS G13D)
VVVYADDVI

SEQ ID NO: 94997 - protein, 9 aa, synthetic construct
  source 1..9: note = Seed: VVVGAGDVG (KRAS G13D)
VVVYADDVL

SEQ ID NO: 94998 - protein, 9 aa, synthetic construct
  source 1..9: note = Seed: VVVGAGDVG (KRAS G13D)
VVVYADDVM

SEQ ID NO: 94999 - protein, 9 aa, synthetic construct
  source 1..9: note = Seed: VVVGAGDVG (KRAS G13D)
VVVYADDVQ

SEQ ID NO: 95000 - protein, 9 aa, synthetic construct
  source 1..9: note = Seed: VVVGAGDVG (KRAS G13D)
VVVYADDVS

SEQ ID NO: 95001 - protein, 9 aa, synthetic construct
  source 1..9: note = Seed: VVVGAGDVG (KRAS G13D)
VVVYADDVT

SEQ ID NO: 95002 - protein, 9 aa, synthetic construct
  source 1..9: note = Seed: VVVGAGDVG (KRAS G13D)
VVVYADDVV

SEQ ID NO: 95003 - protein, 9 aa, synthetic construct
  source 1..9: note = Seed: VVVGAGDVG (KRAS G13D)
VVVYADDVY

SEQ ID NO: 95004 - protein, 9 aa, synthetic construct
  source 1..9: note = Seed: VVVGAGDVG (KRAS G13D)
VVVYAEDVA

SEQ ID NO: 95005 - protein, 9 aa, synthetic construct
  source 1..9: note = Seed: VVVGAGDVG (KRAS G13D)
VVVYAEDVI

SEQ ID NO: 95006 - protein, 9 aa, synthetic construct
  source 1..9: note = Seed: VVVGAGDVG (KRAS G13D)
VVVYAEDVL

SEQ ID NO: 95007 - protein, 9 aa, synthetic construct
  source 1..9: note = Seed: VVVGAGDVG (KRAS G13D)
VVVYAEDVV

SEQ ID NO: 95008 - protein, 9 aa, synthetic construct
  source 1..9: note = Seed: VVVGAGDVG (KRAS G13D)
VVVYAIDVA

SEQ ID NO: 95009 - protein, 9 aa, synthetic construct
  source 1..9: note = Seed: VVVGAGDVG (KRAS G13D)
VVVYAIDVI

SEQ ID NO: 95010 - protein, 9 aa, synthetic construct
  source 1..9: note = Seed: VVVGAGDVG (KRAS G13D)
VVVYAIDVL

SEQ ID NO: 95011 - protein, 9 aa, synthetic construct
  source 1..9: note = Seed: VVVGAGDVG (KRAS G13D)
VVVYAIDVM

SEQ ID NO: 95012 - protein, 9 aa, synthetic construct
  source 1..9: note = Seed: VVVGAGDVG (KRAS G13D)
VVVYAIDVQ

SEQ ID NO: 95013 - protein, 9 aa, synthetic construct
  source 1..9: note = Seed: VVVGAGDVG (KRAS G13D)
VVVYAIDVR

SEQ ID NO: 95014 - protein, 9 aa, synthetic construct
  source 1..9: note = Seed: VVVGAGDVG (KRAS G13D)
VVVYAIDVS

SEQ ID NO: 95015 - protein, 9 aa, synthetic construct
  source 1..9: note = Seed: VVVGAGDVG (KRAS G13D)
VVVYAIDVV

SEQ ID NO: 95016 - protein, 9 aa, synthetic construct
  source 1..9: note = Seed: VVVGAGDVG (KRAS G13D)
VVVYAIDVY

SEQ ID NO: 95017 - protein, 9 aa, synthetic construct
  source 1..9: note = Seed: VVVGAGDVG (KRAS G13D)
VVVYALDVA

SEQ ID NO: 95018 - protein, 9 aa, synthetic construct
  source 1..9: note = Seed: VVVGAGDVG (KRAS G13D)
VVVYALDVP

SEQ ID NO: 95019 - protein, 9 aa, synthetic construct
  source 1..9: note = Seed: VVVGAGDVG (KRAS G13D)
VVVYALDVQ

SEQ ID NO: 95020 - protein, 9 aa, synthetic construct
  source 1..9: note = Seed: VVVGAGDVG (KRAS G13D)
VVVYAMDVA

SEQ ID NO: 95021 - protein, 9 aa, synthetic construct
  source 1..9: note = Seed: VVVGAGDVG (KRAS G13D)
VVVYAMDVF

SEQ ID NO: 95022 - protein, 9 aa, synthetic construct
  source 1..9: note = Seed: VVVGAGDVG (KRAS G13D)
VVVYAMDVI

SEQ ID NO: 95023 - protein, 9 aa, synthetic construct
  source 1..9: note = Seed: VVVGAGDVG (KRAS G13D)
VVVYAMDVL

SEQ ID NO: 95024 - protein, 9 aa, synthetic construct
  source 1..9: note = Seed: VVVGAGDVG (KRAS G13D)
VVVYAMDVM

SEQ ID NO: 95025 - protein, 9 aa, synthetic construct
  source 1..9: note = Seed: VVVGAGDVG (KRAS G13D)
VVVYAMDVQ

SEQ ID NO: 95026 - protein, 9 aa, synthetic construct
  source 1..9: note = Seed: VVVGAGDVG (KRAS G13D)
VVVYAMDVR

SEQ ID NO: 95027 - protein, 9 aa, synthetic construct
  source 1..9: note = Seed: VVVGAGDVG (KRAS G13D)
VVVYAMDVS

SEQ ID NO: 95028 - protein, 9 aa, synthetic construct
  source 1..9: note = Seed: VVVGAGDVG (KRAS G13D)
VVVYAMDVV

SEQ ID NO: 95029 - protein, 9 aa, synthetic construct
  source 1..9: note = Seed: VVVGAGDVG (KRAS G13D)
VVVYAMDVY

SEQ ID NO: 95030 - protein, 9 aa, synthetic construct
  source 1..9: note = Seed: VVVGAGDVG (KRAS G13D)
VVVYANDVA

SEQ ID NO: 95031 - protein, 9 aa, synthetic construct
  source 1..9: note = Seed: VVVGAGDVG (KRAS G13D)
VVVYANDVC

SEQ ID NO: 95032 - protein, 9 aa, synthetic construct
  source 1..9: note = Seed: VVVGAGDVG (KRAS G13D)
VVVYANDVD

SEQ ID NO: 95033 - protein, 9 aa, synthetic construct
  source 1..9: note = Seed: VVVGAGDVG (KRAS G13D)
VVVYANDVE

SEQ ID NO: 95034 - protein, 9 aa, synthetic construct
  source 1..9: note = Seed: VVVGAGDVG (KRAS G13D)
VVVYANDVF

SEQ ID NO: 95035 - protein, 9 aa, synthetic construct
  source 1..9: note = Seed: VVVGAGDVG (KRAS G13D)
VVVYANDVG

SEQ ID NO: 95036 - protein, 9 aa, synthetic construct
  source 1..9: note = Seed: VVVGAGDVG (KRAS G13D)
VVVYANDVH

SEQ ID NO: 95037 - protein, 9 aa, synthetic construct
  source 1..9: note = Seed: VVVGAGDVG (KRAS G13D)
VVVYANDVI

SEQ ID NO: 95038 - protein, 9 aa, synthetic construct
  source 1..9: note = Seed: VVVGAGDVG (KRAS G13D)
VVVYANDVL

SEQ ID NO: 95039 - protein, 9 aa, synthetic construct
  source 1..9: note = Seed: VVVGAGDVG (KRAS G13D)
VVVYANDVM

SEQ ID NO: 95040 - protein, 9 aa, synthetic construct
  source 1..9: note = Seed: VVVGAGDVG (KRAS G13D)
VVVYANDVN

SEQ ID NO: 95041 - protein, 9 aa, synthetic construct
  source 1..9: note = Seed: VVVGAGDVG (KRAS G13D)
VVVYANDVQ

SEQ ID NO: 95042 - protein, 9 aa, synthetic construct
  source 1..9: note = Seed: VVVGAGDVG (KRAS G13D)
VVVYANDVR

SEQ ID NO: 95043 - protein, 9 aa, synthetic construct
  source 1..9: note = Seed: VVVGAGDVG (KRAS G13D)
VVVYANDVS

SEQ ID NO: 95044 - protein, 9 aa, synthetic construct
  source 1..9: note = Seed: VVVGAGDVG (KRAS G13D)
VVVYANDVT

SEQ ID NO: 95045 - protein, 9 aa, synthetic construct
  source 1..9: note = Seed: VVVGAGDVG (KRAS G13D)
VVVYANDVV

SEQ ID NO: 95046 - protein, 9 aa, synthetic construct
  source 1..9: note = Seed: VVVGAGDVG (KRAS G13D)
VVVYANDVY

SEQ ID NO: 95047 - protein, 9 aa, synthetic construct
  source 1..9: note = Seed: VVVGAGDVG (KRAS G13D)
VVVYAPDVA

SEQ ID NO: 95048 - protein, 9 aa, synthetic construct
  source 1..9: note = Seed: VVVGAGDVG (KRAS G13D)
VVVYAPDVF

SEQ ID NO: 95049 - protein, 9 aa, synthetic construct
  source 1..9: note = Seed: VVVGAGDVG (KRAS G13D)
VVVYAPDVI

SEQ ID NO: 95050 - protein, 9 aa, synthetic construct
  source 1..9: note = Seed: VVVGAGDVG (KRAS G13D)
VVVYAPDVL

SEQ ID NO: 95051 - protein, 9 aa, synthetic construct
  source 1..9: note = Seed: VVVGAGDVG (KRAS G13D)
VVVYAPDVM

SEQ ID NO: 95052 - protein, 9 aa, synthetic construct
  source 1..9: note = Seed: VVVGAGDVG (KRAS G13D)
VVVYAPDVQ

SEQ ID NO: 95053 - protein, 9 aa, synthetic construct
  source 1..9: note = Seed: VVVGAGDVG (KRAS G13D)
VVVYAPDVS

SEQ ID NO: 95054 - protein, 9 aa, synthetic construct
  source 1..9: note = Seed: VVVGAGDVG (KRAS G13D)
VVVYAPDVV

SEQ ID NO: 95055 - protein, 9 aa, synthetic construct
  source 1..9: note = Seed: VVVGAGDVG (KRAS G13D)
VVVYAPDVY

SEQ ID NO: 95056 - protein, 9 aa, synthetic construct
  source 1..9: note = Seed: VVVGAGDVG (KRAS G13D)
VVVYAQDVI

SEQ ID NO: 95057 - protein, 9 aa, synthetic construct
  source 1..9: note = Seed: VVVGAGDVG (KRAS G13D)
VVVYAQDVL

SEQ ID NO: 95058 - protein, 9 aa, synthetic construct
  source 1..9: note = Seed: VVVGAGDVG (KRAS G13D)
VVVYAQDVM

SEQ ID NO: 95059 - protein, 9 aa, synthetic construct
  source 1..9: note = Seed: VVVGAGDVG (KRAS G13D)
VVVYAQDVV

SEQ ID NO: 95060 - protein, 9 aa, synthetic construct
  source 1..9: note = Seed: VVVGAGDVG (KRAS G13D)
VVVYAQDVY

SEQ ID NO: 95061 - protein, 9 aa, synthetic construct
  source 1..9: note = Seed: VVVGAGDVG (KRAS G13D)
VVVYARDVI

SEQ ID NO: 95062 - protein, 9 aa, synthetic construct
  source 1..9: note = Seed: VVVGAGDVG (KRAS G13D)
VVVYARDVV

SEQ ID NO: 95063 - protein, 9 aa, synthetic construct
  source 1..9: note = Seed: VVVGAGDVG (KRAS G13D)
VVVYASDVA

SEQ ID NO: 95064 - protein, 9 aa, synthetic construct
  source 1..9: note = Seed: VVVGAGDVG (KRAS G13D)
VVVYASDVF

SEQ ID NO: 95065 - protein, 9 aa, synthetic construct
  source 1..9: note = Seed: VVVGAGDVG (KRAS G13D)
VVVYASDVI

SEQ ID NO: 95066 - protein, 9 aa, synthetic construct
  source 1..9: note = Seed: VVVGAGDVG (KRAS G13D)
VVVYASDVL

SEQ ID NO: 95067 - protein, 9 aa, synthetic construct
  source 1..9: note = Seed: VVVGAGDVG (KRAS G13D)
VVVYASDVM

SEQ ID NO: 95068 - protein, 9 aa, synthetic construct
  source 1..9: note = Seed: VVVGAGDVG (KRAS G13D)
VVVYASDVQ

SEQ ID NO: 95069 - protein, 9 aa, synthetic construct
  source 1..9: note = Seed: VVVGAGDVG (KRAS G13D)
VVVYASDVS

SEQ ID NO: 95070 - protein, 9 aa, synthetic construct
  source 1..9: note = Seed: VVVGAGDVG (KRAS G13D)
VVVYASDVV

SEQ ID NO: 95071 - protein, 9 aa, synthetic construct
  source 1..9: note = Seed: VVVGAGDVG (KRAS G13D)
VVVYASDVY

SEQ ID NO: 95072 - protein, 9 aa, synthetic construct
  source 1..9: note = Seed: VVVGAGDVG (KRAS G13D)
VVVYATDVA

SEQ ID NO: 95073 - protein, 9 aa, synthetic construct
  source 1..9: note = Seed: VVVGAGDVG (KRAS G13D)
VVVYATDVF

SEQ ID NO: 95074 - protein, 9 aa, synthetic construct
  source 1..9: note = Seed: VVVGAGDVG (KRAS G13D)
VVVYATDVI

SEQ ID NO: 95075 - protein, 9 aa, synthetic construct
  source 1..9: note = Seed: VVVGAGDVG (KRAS G13D)
VVVYATDVL

SEQ ID NO: 95076 - protein, 9 aa, synthetic construct
  source 1..9: note = Seed: VVVGAGDVG (KRAS G13D)
VVVYATDVM

SEQ ID NO: 95077 - protein, 9 aa, synthetic construct
  source 1..9: note = Seed: VVVGAGDVG (KRAS G13D)
VVVYATDVS

SEQ ID NO: 95078 - protein, 9 aa, synthetic construct
  source 1..9: note = Seed: VVVGAGDVG (KRAS G13D)
VVVYATDVV

SEQ ID NO: 95079 - protein, 9 aa, synthetic construct
  source 1..9: note = Seed: VVVGAGDVG (KRAS G13D)
VVVYATDVY

SEQ ID NO: 95080 - protein, 9 aa, synthetic construct
  source 1..9: note = Seed: VVVGAGDVG (KRAS G13D)
VVVYAVDVA

SEQ ID NO: 95081 - protein, 9 aa, synthetic construct
  source 1..9: note = Seed: VVVGAGDVG (KRAS G13D)
VVVYAVDVM

SEQ ID NO: 95082 - protein, 9 aa, synthetic construct
  source 1..9: note = Seed: VVVGAGDVG (KRAS G13D)
VVVYAVDVY

SEQ ID NO: 95083 - protein, 9 aa, synthetic construct
  source 1..9: note = Seed: VVVGAGDVG (KRAS G13D)
WVVAAADVA

SEQ ID NO: 95084 - protein, 9 aa, synthetic construct
  source 1..9: note = Seed: VVVGAGDVG (KRAS G13D)
WVVAAADVC

SEQ ID NO: 95085 - protein, 9 aa, synthetic construct
  source 1..9: note = Seed: VVVGAGDVG (KRAS G13D)
WVVAAADVD

SEQ ID NO: 95086 - protein, 9 aa, synthetic construct
  source 1..9: note = Seed: VVVGAGDVG (KRAS G13D)
WVVAAADVE

SEQ ID NO: 95087 - protein, 9 aa, synthetic construct
  source 1..9: note = Seed: VVVGAGDVG (KRAS G13D)
WVVAAADVF

SEQ ID NO: 95088 - protein, 9 aa, synthetic construct
  source 1..9: note = Seed: VVVGAGDVG (KRAS G13D)
WVVAAADVG

SEQ ID NO: 95089 - protein, 9 aa, synthetic construct
  source 1..9: note = Seed: VVVGAGDVG (KRAS G13D)
WVVAAADVH

SEQ ID NO: 95090 - protein, 9 aa, synthetic construct
  source 1..9: note = Seed: VVVGAGDVG (KRAS G13D)
WVVAAADVI

SEQ ID NO: 95091 - protein, 9 aa, synthetic construct
  source 1..9: note = Seed: VVVGAGDVG (KRAS G13D)
WVVAAADVK

SEQ ID NO: 95092 - protein, 9 aa, synthetic construct
  source 1..9: note = Seed: VVVGAGDVG (KRAS G13D)
WVVAAADVL

SEQ ID NO: 95093 - protein, 9 aa, synthetic construct
  source 1..9: note = Seed: VVVGAGDVG (KRAS G13D)
WVVAAADVM

SEQ ID NO: 95094 - protein, 9 aa, synthetic construct
  source 1..9: note = Seed: VVVGAGDVG (KRAS G13D)
WVVAAADVN

SEQ ID NO: 95095 - protein, 9 aa, synthetic construct
  source 1..9: note = Seed: VVVGAGDVG (KRAS G13D)
WVVAAADVP

SEQ ID NO: 95096 - protein, 9 aa, synthetic construct
  source 1..9: note = Seed: VVVGAGDVG (KRAS G13D)
WVVAAADVQ

SEQ ID NO: 95097 - protein, 9 aa, synthetic construct
  source 1..9: note = Seed: VVVGAGDVG (KRAS G13D)
WVVAAADVR

SEQ ID NO: 95098 - protein, 9 aa, synthetic construct
  source 1..9: note = Seed: VVVGAGDVG (KRAS G13D)
WVVAAADVS

SEQ ID NO: 95099 - protein, 9 aa, synthetic construct
  source 1..9: note = Seed: VVVGAGDVG (KRAS G13D)
WVVAAADVT

SEQ ID NO: 95100 - protein, 9 aa, synthetic construct
  source 1..9: note = Seed: VVVGAGDVG (KRAS G13D)
WVVAAADVV

SEQ ID NO: 95101 - protein, 9 aa, synthetic construct
  source 1..9: note = Seed: VVVGAGDVG (KRAS G13D)
WVVAAADVW

SEQ ID NO: 95102 - protein, 9 aa, synthetic construct
  source 1..9: note = Seed: VVVGAGDVG (KRAS G13D)
WVVAAADVY

SEQ ID NO: 95103 - protein, 9 aa, synthetic construct
  source 1..9: note = Seed: VVVGAGDVG (KRAS G13D)
WVVAADDVA

SEQ ID NO: 95104 - protein, 9 aa, synthetic construct
  source 1..9: note = Seed: VVVGAGDVG (KRAS G13D)
WVVAAEDVA

SEQ ID NO: 95105 - protein, 9 aa, synthetic construct
  source 1..9: note = Seed: VVVGAGDVG (KRAS G13D)
WVVAAEDVN

SEQ ID NO: 95106 - protein, 9 aa, synthetic construct
  source 1..9: note = Seed: VVVGAGDVG (KRAS G13D)
WVVAAEDVS

SEQ ID NO: 95107 - protein, 9 aa, synthetic construct
  source 1..9: note = Seed: VVVGAGDVG (KRAS G13D)
WVVAAEDVV

SEQ ID NO: 95108 - protein, 9 aa, synthetic construct
  source 1..9: note = Seed: VVVGAGDVG (KRAS G13D)
WVVAAGDVA

SEQ ID NO: 95109 - protein, 9 aa, synthetic construct
  source 1..9: note = Seed: VVVGAGDVG (KRAS G13D)
WVVAAGDVH

SEQ ID NO: 95110 - protein, 9 aa, synthetic construct
  source 1..9: note = Seed: VVVGAGDVG (KRAS G13D)
WVVAAGDVI

SEQ ID NO: 95111 - protein, 9 aa, synthetic construct
  source 1..9: note = Seed: VVVGAGDVG (KRAS G13D)
WVVAAGDVL

SEQ ID NO: 95112 - protein, 9 aa, synthetic construct
  source 1..9: note = Seed: VVVGAGDVG (KRAS G13D)
WVVAAGDVM

SEQ ID NO: 95113 - protein, 9 aa, synthetic construct
  source 1..9: note = Seed: VVVGAGDVG (KRAS G13D)
WVVAAGDVN

SEQ ID NO: 95114 - protein, 9 aa, synthetic construct
  source 1..9: note = Seed: VVVGAGDVG (KRAS G13D)
WVVAAGDVQ

SEQ ID NO: 95115 - protein, 9 aa, synthetic construct
  source 1..9: note = Seed: VVVGAGDVG (KRAS G13D)
WVVAAGDVS

SEQ ID NO: 95116 - protein, 9 aa, synthetic construct
  source 1..9: note = Seed: VVVGAGDVG (KRAS G13D)
WVVAAGDVT

SEQ ID NO: 95117 - protein, 9 aa, synthetic construct
  source 1..9: note = Seed: VVVGAGDVG (KRAS G13D)
WVVAAGDVV

SEQ ID NO: 95118 - protein, 9 aa, synthetic construct
  source 1..9: note = Seed: VVVGAGDVG (KRAS G13D)
WVVAAGDVY

SEQ ID NO: 95119 - protein, 9 aa, synthetic construct
  source 1..9: note = Seed: VVVGAGDVG (KRAS G13D)
WVVAAHDVA

SEQ ID NO: 95120 - protein, 9 aa, synthetic construct
  source 1..9: note = Seed: VVVGAGDVG (KRAS G13D)
WVVAAHDVG

SEQ ID NO: 95121 - protein, 9 aa, synthetic construct
  source 1..9: note = Seed: VVVGAGDVG (KRAS G13D)
WVVAAHDVI

SEQ ID NO: 95122 - protein, 9 aa, synthetic construct
  source 1..9: note = Seed: VVVGAGDVG (KRAS G13D)
WVVAAHDVL

SEQ ID NO: 95123 - protein, 9 aa, synthetic construct
  source 1..9: note = Seed: VVVGAGDVG (KRAS G13D)
WVVAAHDVM

SEQ ID NO: 95124 - protein, 9 aa, synthetic construct
  source 1..9: note = Seed: VVVGAGDVG (KRAS G13D)
WVVAAHDVN

SEQ ID NO: 95125 - protein, 9 aa, synthetic construct
  source 1..9: note = Seed: VVVGAGDVG (KRAS G13D)
WVVAAHDVQ

SEQ ID NO: 95126 - protein, 9 aa, synthetic construct
  source 1..9: note = Seed: VVVGAGDVG (KRAS G13D)
WVVAAHDVS

SEQ ID NO: 95127 - protein, 9 aa, synthetic construct
  source 1..9: note = Seed: VVVGAGDVG (KRAS G13D)
WVVAAHDVT

SEQ ID NO: 95128 - protein, 9 aa, synthetic construct
  source 1..9: note = Seed: VVVGAGDVG (KRAS G13D)
WVVAAHDVV

SEQ ID NO: 95129 - protein, 9 aa, synthetic construct
  source 1..9: note = Seed: VVVGAGDVG (KRAS G13D)
WVVAAIDVA

SEQ ID NO: 95130 - protein, 9 aa, synthetic construct
  source 1..9: note = Seed: VVVGAGDVG (KRAS G13D)
WVVAAIDVD

SEQ ID NO: 95131 - protein, 9 aa, synthetic construct
  source 1..9: note = Seed: VVVGAGDVG (KRAS G13D)
WVVAAIDVE

SEQ ID NO: 95132 - protein, 9 aa, synthetic construct
  source 1..9: note = Seed: VVVGAGDVG (KRAS G13D)
WVVAAIDVG

SEQ ID NO: 95133 - protein, 9 aa, synthetic construct
  source 1..9: note = Seed: VVVGAGDVG (KRAS G13D)
WVVAAIDVH

SEQ ID NO: 95134 - protein, 9 aa, synthetic construct
  source 1..9: note = Seed: VVVGAGDVG (KRAS G13D)
WVVAAIDVI

SEQ ID NO: 95135 - protein, 9 aa, synthetic construct
  source 1..9: note = Seed: VVVGAGDVG (KRAS G13D)
WVVAAIDVK

SEQ ID NO: 95136 - protein, 9 aa, synthetic construct
  source 1..9: note = Seed: VVVGAGDVG (KRAS G13D)
WVVAAIDVL

SEQ ID NO: 95137 - protein, 9 aa, synthetic construct
  source 1..9: note = Seed: VVVGAGDVG (KRAS G13D)
WVVAAIDVM

SEQ ID NO: 95138 - protein, 9 aa, synthetic construct
  source 1..9: note = Seed: VVVGAGDVG (KRAS G13D)
WVVAAIDVN

SEQ ID NO: 95139 - protein, 9 aa, synthetic construct
  source 1..9: note = Seed: VVVGAGDVG (KRAS G13D)
WVVAAIDVQ

SEQ ID NO: 95140 - protein, 9 aa, synthetic construct
  source 1..9: note = Seed: VVVGAGDVG (KRAS G13D)
WVVAAIDVR

SEQ ID NO: 95141 - protein, 9 aa, synthetic construct
  source 1..9: note = Seed: VVVGAGDVG (KRAS G13D)
WVVAAIDVS

SEQ ID NO: 95142 - protein, 9 aa, synthetic construct
  source 1..9: note = Seed: VVVGAGDVG (KRAS G13D)
WVVAAIDVT

SEQ ID NO: 95143 - protein, 9 aa, synthetic construct
  source 1..9: note = Seed: VVVGAGDVG (KRAS G13D)
WVVAAIDVV

SEQ ID NO: 95144 - protein, 9 aa, synthetic construct
  source 1..9: note = Seed: VVVGAGDVG (KRAS G13D)
WVVAAIDVY

SEQ ID NO: 95145 - protein, 9 aa, synthetic construct
  source 1..9: note = Seed: VVVGAGDVG (KRAS G13D)
WVVAALDVG

SEQ ID NO: 95146 - protein, 9 aa, synthetic construct
  source 1..9: note = Seed: VVVGAGDVG (KRAS G13D)
WVVAALDVS

SEQ ID NO: 95147 - protein, 9 aa, synthetic construct
  source 1..9: note = Seed: VVVGAGDVG (KRAS G13D)
WVVAAMDVC

SEQ ID NO: 95148 - protein, 9 aa, synthetic construct
  source 1..9: note = Seed: VVVGAGDVG (KRAS G13D)
WVVAAMDVG

SEQ ID NO: 95149 - protein, 9 aa, synthetic construct
  source 1..9: note = Seed: VVVGAGDVG (KRAS G13D)
WVVAAMDVS

SEQ ID NO: 95150 - protein, 9 aa, synthetic construct
  source 1..9: note = Seed: VVVGAGDVG (KRAS G13D)
WVVAANDVA

SEQ ID NO: 95151 - protein, 9 aa, synthetic construct
  source 1..9: note = Seed: VVVGAGDVG (KRAS G13D)
WVVAANDVC

SEQ ID NO: 95152 - protein, 9 aa, synthetic construct
  source 1..9: note = Seed: VVVGAGDVG (KRAS G13D)
WVVAANDVD

SEQ ID NO: 95153 - protein, 9 aa, synthetic construct
  source 1..9: note = Seed: VVVGAGDVG (KRAS G13D)
WVVAANDVE

SEQ ID NO: 95154 - protein, 9 aa, synthetic construct
  source 1..9: note = Seed: VVVGAGDVG (KRAS G13D)
WVVAANDVF

SEQ ID NO: 95155 - protein, 9 aa, synthetic construct
  source 1..9: note = Seed: VVVGAGDVG (KRAS G13D)
WVVAANDVG

SEQ ID NO: 95156 - protein, 9 aa, synthetic construct
  source 1..9: note = Seed: VVVGAGDVG (KRAS G13D)
WVVAANDVH

SEQ ID NO: 95157 - protein, 9 aa, synthetic construct
  source 1..9: note = Seed: VVVGAGDVG (KRAS G13D)
WVVAANDVI

SEQ ID NO: 95158 - protein, 9 aa, synthetic construct
  source 1..9: note = Seed: VVVGAGDVG (KRAS G13D)
WVVAANDVK

SEQ ID NO: 95159 - protein, 9 aa, synthetic construct
  source 1..9: note = Seed: VVVGAGDVG (KRAS G13D)
WVVAANDVL

SEQ ID NO: 95160 - protein, 9 aa, synthetic construct
  source 1..9: note = Seed: VVVGAGDVG (KRAS G13D)
WVVAANDVM

SEQ ID NO: 95161 - protein, 9 aa, synthetic construct
  source 1..9: note = Seed: VVVGAGDVG (KRAS G13D)
WVVAANDVN

SEQ ID NO: 95162 - protein, 9 aa, synthetic construct
  source 1..9: note = Seed: VVVGAGDVG (KRAS G13D)
WVVAANDVP

SEQ ID NO: 95163 - protein, 9 aa, synthetic construct
  source 1..9: note = Seed: VVVGAGDVG (KRAS G13D)
WVVAANDVQ

SEQ ID NO: 95164 - protein, 9 aa, synthetic construct
  source 1..9: note = Seed: VVVGAGDVG (KRAS G13D)
WVVAANDVR

SEQ ID NO: 95165 - protein, 9 aa, synthetic construct
  source 1..9: note = Seed: VVVGAGDVG (KRAS G13D)
WVVAANDVS

SEQ ID NO: 95166 - protein, 9 aa, synthetic construct
  source 1..9: note = Seed: VVVGAGDVG (KRAS G13D)
WVVAANDVT

SEQ ID NO: 95167 - protein, 9 aa, synthetic construct
  source 1..9: note = Seed: VVVGAGDVG (KRAS G13D)
WVVAANDVV

SEQ ID NO: 95168 - protein, 9 aa, synthetic construct
  source 1..9: note = Seed: VVVGAGDVG (KRAS G13D)
WVVAANDVY

SEQ ID NO: 95169 - protein, 9 aa, synthetic construct
  source 1..9: note = Seed: VVVGAGDVG (KRAS G13D)
WVVAAPDVA

SEQ ID NO: 95170 - protein, 9 aa, synthetic construct
  source 1..9: note = Seed: VVVGAGDVG (KRAS G13D)
WVVAAPDVD

SEQ ID NO: 95171 - protein, 9 aa, synthetic construct
  source 1..9: note = Seed: VVVGAGDVG (KRAS G13D)
WVVAAPDVF

SEQ ID NO: 95172 - protein, 9 aa, synthetic construct
  source 1..9: note = Seed: VVVGAGDVG (KRAS G13D)
WVVAAPDVG

SEQ ID NO: 95173 - protein, 9 aa, synthetic construct
  source 1..9: note = Seed: VVVGAGDVG (KRAS G13D)
WVVAAPDVH

SEQ ID NO: 95174 - protein, 9 aa, synthetic construct
  source 1..9: note = Seed: VVVGAGDVG (KRAS G13D)
WVVAAPDVI

SEQ ID NO: 95175 - protein, 9 aa, synthetic construct
  source 1..9: note = Seed: VVVGAGDVG (KRAS G13D)
WVVAAPDVK

SEQ ID NO: 95176 - protein, 9 aa, synthetic construct
  source 1..9: note = Seed: VVVGAGDVG (KRAS G13D)
WVVAAPDVL

SEQ ID NO: 95177 - protein, 9 aa, synthetic construct
  source 1..9: note = Seed: VVVGAGDVG (KRAS G13D)
WVVAAPDVM

SEQ ID NO: 95178 - protein, 9 aa, synthetic construct
  source 1..9: note = Seed: VVVGAGDVG (KRAS G13D)
WVVAAPDVN

SEQ ID NO: 95179 - protein, 9 aa, synthetic construct
  source 1..9: note = Seed: VVVGAGDVG (KRAS G13D)
WVVAAPDVP

SEQ ID NO: 95180 - protein, 9 aa, synthetic construct
  source 1..9: note = Seed: VVVGAGDVG (KRAS G13D)
WVVAAPDVQ

SEQ ID NO: 95181 - protein, 9 aa, synthetic construct
  source 1..9: note = Seed: VVVGAGDVG (KRAS G13D)
WVVAAPDVR

SEQ ID NO: 95182 - protein, 9 aa, synthetic construct
  source 1..9: note = Seed: VVVGAGDVG (KRAS G13D)
WVVAAPDVS

SEQ ID NO: 95183 - protein, 9 aa, synthetic construct
  source 1..9: note = Seed: VVVGAGDVG (KRAS G13D)
WVVAAPDVT

SEQ ID NO: 95184 - protein, 9 aa, synthetic construct
  source 1..9: note = Seed: VVVGAGDVG (KRAS G13D)
WVVAAPDVV

SEQ ID NO: 95185 - protein, 9 aa, synthetic construct
  source 1..9: note = Seed: VVVGAGDVG (KRAS G13D)
WVVAAPDVY

SEQ ID NO: 95186 - protein, 9 aa, synthetic construct
  source 1..9: note = Seed: VVVGAGDVG (KRAS G13D)
WVVAAQDVA

SEQ ID NO: 95187 - protein, 9 aa, synthetic construct
  source 1..9: note = Seed: VVVGAGDVG (KRAS G13D)
WVVAAQDVH

SEQ ID NO: 95188 - protein, 9 aa, synthetic construct
  source 1..9: note = Seed: VVVGAGDVG (KRAS G13D)
WVVAAQDVM

SEQ ID NO: 95189 - protein, 9 aa, synthetic construct
  source 1..9: note = Seed: VVVGAGDVG (KRAS G13D)
WVVAAQDVN

SEQ ID NO: 95190 - protein, 9 aa, synthetic construct
  source 1..9: note = Seed: VVVGAGDVG (KRAS G13D)
WVVAAQDVQ

SEQ ID NO: 95191 - protein, 9 aa, synthetic construct
  source 1..9: note = Seed: VVVGAGDVG (KRAS G13D)
WVVAAQDVS

SEQ ID NO: 95192 - protein, 9 aa, synthetic construct
  source 1..9: note = Seed: VVVGAGDVG (KRAS G13D)
WVVAAQDVT

SEQ ID NO: 95193 - protein, 9 aa, synthetic construct
  source 1..9: note = Seed: VVVGAGDVG (KRAS G13D)
WVVAARDVA

SEQ ID NO: 95194 - protein, 9 aa, synthetic construct
  source 1..9: note = Seed: VVVGAGDVG (KRAS G13D)
WVVAASDVA

SEQ ID NO: 95195 - protein, 9 aa, synthetic construct
  source 1..9: note = Seed: VVVGAGDVG (KRAS G13D)
WVVAASDVD

SEQ ID NO: 95196 - protein, 9 aa, synthetic construct
  source 1..9: note = Seed: VVVGAGDVG (KRAS G13D)
WVVAASDVE

SEQ ID NO: 95197 - protein, 9 aa, synthetic construct
  source 1..9: note = Seed: VVVGAGDVG (KRAS G13D)
WVVAASDVF

SEQ ID NO: 95198 - protein, 9 aa, synthetic construct
  source 1..9: note = Seed: VVVGAGDVG (KRAS G13D)
WVVAASDVG

SEQ ID NO: 95199 - protein, 9 aa, synthetic construct
  source 1..9: note = Seed: VVVGAGDVG (KRAS G13D)
WVVAASDVH

SEQ ID NO: 95200 - protein, 9 aa, synthetic construct
  source 1..9: note = Seed: VVVGAGDVG (KRAS G13D)
WVVAASDVI

SEQ ID NO: 95201 - protein, 9 aa, synthetic construct
  source 1..9: note = Seed: VVVGAGDVG (KRAS G13D)
WVVAASDVK

SEQ ID NO: 95202 - protein, 9 aa, synthetic construct
  source 1..9: note = Seed: VVVGAGDVG (KRAS G13D)
WVVAASDVL

SEQ ID NO: 95203 - protein, 9 aa, synthetic construct
  source 1..9: note = Seed: VVVGAGDVG (KRAS G13D)
WVVAASDVM

SEQ ID NO: 95204 - protein, 9 aa, synthetic construct
  source 1..9: note = Seed: VVVGAGDVG (KRAS G13D)
WVVAASDVN

SEQ ID NO: 95205 - protein, 9 aa, synthetic construct
  source 1..9: note = Seed: VVVGAGDVG (KRAS G13D)
WVVAASDVP

SEQ ID NO: 95206 - protein, 9 aa, synthetic construct
  source 1..9: note = Seed: VVVGAGDVG (KRAS G13D)
WVVAASDVQ

SEQ ID NO: 95207 - protein, 9 aa, synthetic construct
  source 1..9: note = Seed: VVVGAGDVG (KRAS G13D)
WVVAASDVR

SEQ ID NO: 95208 - protein, 9 aa, synthetic construct
  source 1..9: note = Seed: VVVGAGDVG (KRAS G13D)
WVVAASDVS

SEQ ID NO: 95209 - protein, 9 aa, synthetic construct
  source 1..9: note = Seed: VVVGAGDVG (KRAS G13D)
WVVAASDVT

SEQ ID NO: 95210 - protein, 9 aa, synthetic construct
  source 1..9: note = Seed: VVVGAGDVG (KRAS G13D)
WVVAASDVV

SEQ ID NO: 95211 - protein, 9 aa, synthetic construct
  source 1..9: note = Seed: VVVGAGDVG (KRAS G13D)
WVVAASDVW

SEQ ID NO: 95212 - protein, 9 aa, synthetic construct
  source 1..9: note = Seed: VVVGAGDVG (KRAS G13D)
WVVAASDVY

SEQ ID NO: 95213 - protein, 9 aa, synthetic construct
  source 1..9: note = Seed: VVVGAGDVG (KRAS G13D)
WVVAATDVA

SEQ ID NO: 95214 - protein, 9 aa, synthetic construct
  source 1..9: note = Seed: VVVGAGDVG (KRAS G13D)
WVVAATDVD

SEQ ID NO: 95215 - protein, 9 aa, synthetic construct
  source 1..9: note = Seed: VVVGAGDVG (KRAS G13D)
WVVAATDVE

SEQ ID NO: 95216 - protein, 9 aa, synthetic construct
  source 1..9: note = Seed: VVVGAGDVG (KRAS G13D)
WVVAATDVF

SEQ ID NO: 95217 - protein, 9 aa, synthetic construct
  source 1..9: note = Seed: VVVGAGDVG (KRAS G13D)
WVVAATDVG

SEQ ID NO: 95218 - protein, 9 aa, synthetic construct
  source 1..9: note = Seed: VVVGAGDVG (KRAS G13D)
WVVAATDVH

SEQ ID NO: 95219 - protein, 9 aa, synthetic construct
  source 1..9: note = Seed: VVVGAGDVG (KRAS G13D)
WVVAATDVI

SEQ ID NO: 95220 - protein, 9 aa, synthetic construct
  source 1..9: note = Seed: VVVGAGDVG (KRAS G13D)
WVVAATDVK

SEQ ID NO: 95221 - protein, 9 aa, synthetic construct
  source 1..9: note = Seed: VVVGAGDVG (KRAS G13D)
WVVAATDVL

SEQ ID NO: 95222 - protein, 9 aa, synthetic construct
  source 1..9: note = Seed: VVVGAGDVG (KRAS G13D)
WVVAATDVM

SEQ ID NO: 95223 - protein, 9 aa, synthetic construct
  source 1..9: note = Seed: VVVGAGDVG (KRAS G13D)
WVVAATDVN

SEQ ID NO: 95224 - protein, 9 aa, synthetic construct
  source 1..9: note = Seed: VVVGAGDVG (KRAS G13D)
WVVAATDVP

SEQ ID NO: 95225 - protein, 9 aa, synthetic construct
  source 1..9: note = Seed: VVVGAGDVG (KRAS G13D)
WVVAATDVQ

SEQ ID NO: 95226 - protein, 9 aa, synthetic construct
  source 1..9: note = Seed: VVVGAGDVG (KRAS G13D)
WVVAATDVR

SEQ ID NO: 95227 - protein, 9 aa, synthetic construct
  source 1..9: note = Seed: VVVGAGDVG (KRAS G13D)
WVVAATDVS

SEQ ID NO: 95228 - protein, 9 aa, synthetic construct
  source 1..9: note = Seed: VVVGAGDVG (KRAS G13D)
WVVAATDVT

SEQ ID NO: 95229 - protein, 9 aa, synthetic construct
  source 1..9: note = Seed: VVVGAGDVG (KRAS G13D)
WVVAATDVV

SEQ ID NO: 95230 - protein, 9 aa, synthetic construct
  source 1..9: note = Seed: VVVGAGDVG (KRAS G13D)
WVVAATDVY

SEQ ID NO: 95231 - protein, 9 aa, synthetic construct
  source 1..9: note = Seed: VVVGAGDVG (KRAS G13D)
WVVAAVDVA

SEQ ID NO: 95232 - protein, 9 aa, synthetic construct
  source 1..9: note = Seed: VVVGAGDVG (KRAS G13D)
WVVAAVDVD

SEQ ID NO: 95233 - protein, 9 aa, synthetic construct
  source 1..9: note = Seed: VVVGAGDVG (KRAS G13D)
WVVAAVDVE

SEQ ID NO: 95234 - protein, 9 aa, synthetic construct
  source 1..9: note = Seed: VVVGAGDVG (KRAS G13D)
WVVAAVDVG

SEQ ID NO: 95235 - protein, 9 aa, synthetic construct
  source 1..9: note = Seed: VVVGAGDVG (KRAS G13D)
WVVAAVDVH

SEQ ID NO: 95236 - protein, 9 aa, synthetic construct
  source 1..9: note = Seed: VVVGAGDVG (KRAS G13D)
WVVAAVDVI

SEQ ID NO: 95237 - protein, 9 aa, synthetic construct
  source 1..9: note = Seed: VVVGAGDVG (KRAS G13D)
WVVAAVDVK

SEQ ID NO: 95238 - protein, 9 aa, synthetic construct
  source 1..9: note = Seed: VVVGAGDVG (KRAS G13D)
WVVAAVDVL

SEQ ID NO: 95239 - protein, 9 aa, synthetic construct
  source 1..9: note = Seed: VVVGAGDVG (KRAS G13D)
WVVAAVDVM

SEQ ID NO: 95240 - protein, 9 aa, synthetic construct
  source 1..9: note = Seed: VVVGAGDVG (KRAS G13D)
WVVAAVDVN

SEQ ID NO: 95241 - protein, 9 aa, synthetic construct
  source 1..9: note = Seed: VVVGAGDVG (KRAS G13D)
WVVAAVDVP

SEQ ID NO: 95242 - protein, 9 aa, synthetic construct
  source 1..9: note = Seed: VVVGAGDVG (KRAS G13D)
WVVAAVDVQ

SEQ ID NO: 95243 - protein, 9 aa, synthetic construct
  source 1..9: note = Seed: VVVGAGDVG (KRAS G13D)
WVVAAVDVR

SEQ ID NO: 95244 - protein, 9 aa, synthetic construct
  source 1..9: note = Seed: VVVGAGDVG (KRAS G13D)
WVVAAVDVS

SEQ ID NO: 95245 - protein, 9 aa, synthetic construct
  source 1..9: note = Seed: VVVGAGDVG (KRAS G13D)
WVVAAVDVT

SEQ ID NO: 95246 - protein, 9 aa, synthetic construct
  source 1..9: note = Seed: VVVGAGDVG (KRAS G13D)
WVVAAVDVV

SEQ ID NO: 95247 - protein, 9 aa, synthetic construct
  source 1..9: note = Seed: VVVGAGDVG (KRAS G13D)
WVVAAVDVY

SEQ ID NO: 95248 - protein, 9 aa, synthetic construct
  source 1..9: note = Seed: VVVGAGDVG (KRAS G13D)
WVVAAYDVA

SEQ ID NO: 95249 - protein, 9 aa, synthetic construct
  source 1..9: note = Seed: VVVGAGDVG (KRAS G13D)
WVVCAADVA

SEQ ID NO: 95250 - protein, 9 aa, synthetic construct
  source 1..9: note = Seed: VVVGAGDVG (KRAS G13D)
WVVCAADVN

SEQ ID NO: 95251 - protein, 9 aa, synthetic construct
  source 1..9: note = Seed: VVVGAGDVG (KRAS G13D)
WVVCAADVS

SEQ ID NO: 95252 - protein, 9 aa, synthetic construct
  source 1..9: note = Seed: VVVGAGDVG (KRAS G13D)
WVVCALDVA

SEQ ID NO: 95253 - protein, 9 aa, synthetic construct
  source 1..9: note = Seed: VVVGAGDVG (KRAS G13D)
WVVCAMDVA

SEQ ID NO: 95254 - protein, 9 aa, synthetic construct
  source 1..9: note = Seed: VVVGAGDVG (KRAS G13D)
WVVCANDVA

SEQ ID NO: 95255 - protein, 9 aa, synthetic construct
  source 1..9: note = Seed: VVVGAGDVG (KRAS G13D)
WVVCASDVA

SEQ ID NO: 95256 - protein, 9 aa, synthetic construct
  source 1..9: note = Seed: VVVGAGDVG (KRAS G13D)
WVVCATDVA

SEQ ID NO: 95257 - protein, 9 aa, synthetic construct
  source 1..9: note = Seed: VVVGAGDVG (KRAS G13D)
WVVDAADVA

SEQ ID NO: 95258 - protein, 9 aa, synthetic construct
  source 1..9: note = Seed: VVVGAGDVG (KRAS G13D)
WVVDAADVF

SEQ ID NO: 95259 - protein, 9 aa, synthetic construct
  source 1..9: note = Seed: VVVGAGDVG (KRAS G13D)
WVVDAADVY

SEQ ID NO: 95260 - protein, 9 aa, synthetic construct
  source 1..9: note = Seed: VVVGAGDVG (KRAS G13D)
WVVDAIDVF

SEQ ID NO: 95261 - protein, 9 aa, synthetic construct
  source 1..9: note = Seed: VVVGAGDVG (KRAS G13D)
WVVDAIDVM

SEQ ID NO: 95262 - protein, 9 aa, synthetic construct
  source 1..9: note = Seed: VVVGAGDVG (KRAS G13D)
WVVDANDVA

SEQ ID NO: 95263 - protein, 9 aa, synthetic construct
  source 1..9: note = Seed: VVVGAGDVG (KRAS G13D)
WVVDANDVS

SEQ ID NO: 95264 - protein, 9 aa, synthetic construct
  source 1..9: note = Seed: VVVGAGDVG (KRAS G13D)
WVVDASDVA

SEQ ID NO: 95265 - protein, 9 aa, synthetic construct
  source 1..9: note = Seed: VVVGAGDVG (KRAS G13D)
WVVDATDVA

SEQ ID NO: 95266 - protein, 9 aa, synthetic construct
  source 1..9: note = Seed: VVVGAGDVG (KRAS G13D)
WVVEAADVA

SEQ ID NO: 95267 - protein, 9 aa, synthetic construct
  source 1..9: note = Seed: VVVGAGDVG (KRAS G13D)
WVVEAADVF

SEQ ID NO: 95268 - protein, 9 aa, synthetic construct
  source 1..9: note = Seed: VVVGAGDVG (KRAS G13D)
WVVEAADVH

SEQ ID NO: 95269 - protein, 9 aa, synthetic construct
  source 1..9: note = Seed: VVVGAGDVG (KRAS G13D)
WVVEAADVI

SEQ ID NO: 95270 - protein, 9 aa, synthetic construct
  source 1..9: note = Seed: VVVGAGDVG (KRAS G13D)
WVVEAADVK

SEQ ID NO: 95271 - protein, 9 aa, synthetic construct
  source 1..9: note = Seed: VVVGAGDVG (KRAS G13D)
WVVEAADVL

SEQ ID NO: 95272 - protein, 9 aa, synthetic construct
  source 1..9: note = Seed: VVVGAGDVG (KRAS G13D)
WVVEAADVM

SEQ ID NO: 95273 - protein, 9 aa, synthetic construct
  source 1..9: note = Seed: VVVGAGDVG (KRAS G13D)
WVVEAADVN

SEQ ID NO: 95274 - protein, 9 aa, synthetic construct
  source 1..9: note = Seed: VVVGAGDVG (KRAS G13D)
WVVEAADVQ

SEQ ID NO: 95275 - protein, 9 aa, synthetic construct
  source 1..9: note = Seed: VVVGAGDVG (KRAS G13D)
WVVEAADVR

SEQ ID NO: 95276 - protein, 9 aa, synthetic construct
  source 1..9: note = Seed: VVVGAGDVG (KRAS G13D)
WVVEAADVS

SEQ ID NO: 95277 - protein, 9 aa, synthetic construct
  source 1..9: note = Seed: VVVGAGDVG (KRAS G13D)
WVVEAADVT

SEQ ID NO: 95278 - protein, 9 aa, synthetic construct
  source 1..9: note = Seed: VVVGAGDVG (KRAS G13D)
WVVEAADVV

SEQ ID NO: 95279 - protein, 9 aa, synthetic construct
  source 1..9: note = Seed: VVVGAGDVG (KRAS G13D)
WVVEAADVY

SEQ ID NO: 95280 - protein, 9 aa, synthetic construct
  source 1..9: note = Seed: VVVGAGDVG (KRAS G13D)
WVVEAIDVA

SEQ ID NO: 95281 - protein, 9 aa, synthetic construct
  source 1..9: note = Seed: VVVGAGDVG (KRAS G13D)
WVVEAIDVN

SEQ ID NO: 95282 - protein, 9 aa, synthetic construct
  source 1..9: note = Seed: VVVGAGDVG (KRAS G13D)
WVVEAIDVS

SEQ ID NO: 95283 - protein, 9 aa, synthetic construct
  source 1..9: note = Seed: VVVGAGDVG (KRAS G13D)
WVVEANDVA

SEQ ID NO: 95284 - protein, 9 aa, synthetic construct
  source 1..9: note = Seed: VVVGAGDVG (KRAS G13D)
WVVEANDVS

SEQ ID NO: 95285 - protein, 9 aa, synthetic construct
  source 1..9: note = Seed: VVVGAGDVG (KRAS G13D)
WVVEANDVY

SEQ ID NO: 95286 - protein, 9 aa, synthetic construct
  source 1..9: note = Seed: VVVGAGDVG (KRAS G13D)
WVVEAPDVA

SEQ ID NO: 95287 - protein, 9 aa, synthetic construct
  source 1..9: note = Seed: VVVGAGDVG (KRAS G13D)
WVVEASDVA

SEQ ID NO: 95288 - protein, 9 aa, synthetic construct
  source 1..9: note = Seed: VVVGAGDVG (KRAS G13D)
WVVEASDVS

SEQ ID NO: 95289 - protein, 9 aa, synthetic construct
  source 1..9: note = Seed: VVVGAGDVG (KRAS G13D)
WVVEATDVA

SEQ ID NO: 95290 - protein, 9 aa, synthetic construct
  source 1..9: note = Seed: VVVGAGDVG (KRAS G13D)
WVVEAVDVA

SEQ ID NO: 95291 - protein, 9 aa, synthetic construct
  source 1..9: note = Seed: VVVGAGDVG (KRAS G13D)
WVVEAVDVN

SEQ ID NO: 95292 - protein, 9 aa, synthetic construct
  source 1..9: note = Seed: VVVGAGDVG (KRAS G13D)
WVVEAVDVS

SEQ ID NO: 95293 - protein, 9 aa, synthetic construct
  source 1..9: note = Seed: VVVGAGDVG (KRAS G13D)
WVVFAADVA

SEQ ID NO: 95294 - protein, 9 aa, synthetic construct
  source 1..9: note = Seed: VVVGAGDVG (KRAS G13D)
WVVFAADVE

SEQ ID NO: 95295 - protein, 9 aa, synthetic construct
  source 1..9: note = Seed: VVVGAGDVG (KRAS G13D)
WVVFAADVG

SEQ ID NO: 95296 - protein, 9 aa, synthetic construct
  source 1..9: note = Seed: VVVGAGDVG (KRAS G13D)
WVVFAADVH

SEQ ID NO: 95297 - protein, 9 aa, synthetic construct
  source 1..9: note = Seed: VVVGAGDVG (KRAS G13D)
WVVFAADVI

SEQ ID NO: 95298 - protein, 9 aa, synthetic construct
  source 1..9: note = Seed: VVVGAGDVG (KRAS G13D)
WVVFAADVK

SEQ ID NO: 95299 - protein, 9 aa, synthetic construct
  source 1..9: note = Seed: VVVGAGDVG (KRAS G13D)
WVVFAADVL

SEQ ID NO: 95300 - protein, 9 aa, synthetic construct
  source 1..9: note = Seed: VVVGAGDVG (KRAS G13D)
WVVFAADVM

SEQ ID NO: 95301 - protein, 9 aa, synthetic construct
  source 1..9: note = Seed: VVVGAGDVG (KRAS G13D)
WVVFAADVN

SEQ ID NO: 95302 - protein, 9 aa, synthetic construct
  source 1..9: note = Seed: VVVGAGDVG (KRAS G13D)
WVVFAADVP

SEQ ID NO: 95303 - protein, 9 aa, synthetic construct
  source 1..9: note = Seed: VVVGAGDVG (KRAS G13D)
WVVFAADVQ

SEQ ID NO: 95304 - protein, 9 aa, synthetic construct
  source 1..9: note = Seed: VVVGAGDVG (KRAS G13D)
WVVFAADVR

SEQ ID NO: 95305 - protein, 9 aa, synthetic construct
  source 1..9: note = Seed: VVVGAGDVG (KRAS G13D)
WVVFAADVS

SEQ ID NO: 95306 - protein, 9 aa, synthetic construct
  source 1..9: note = Seed: VVVGAGDVG (KRAS G13D)
WVVFAADVT

SEQ ID NO: 95307 - protein, 9 aa, synthetic construct
  source 1..9: note = Seed: VVVGAGDVG (KRAS G13D)
WVVFAADVV

SEQ ID NO: 95308 - protein, 9 aa, synthetic construct
  source 1..9: note = Seed: VVVGAGDVG (KRAS G13D)
WVVFAADVY

SEQ ID NO: 95309 - protein, 9 aa, synthetic construct
  source 1..9: note = Seed: VVVGAGDVG (KRAS G13D)
WVVFADDVA

SEQ ID NO: 95310 - protein, 9 aa, synthetic construct
  source 1..9: note = Seed: VVVGAGDVG (KRAS G13D)
WVVFADDVF

SEQ ID NO: 95311 - protein, 9 aa, synthetic construct
  source 1..9: note = Seed: VVVGAGDVG (KRAS G13D)
WVVFADDVI

SEQ ID NO: 95312 - protein, 9 aa, synthetic construct
  source 1..9: note = Seed: VVVGAGDVG (KRAS G13D)
WVVFADDVL

SEQ ID NO: 95313 - protein, 9 aa, synthetic construct
  source 1..9: note = Seed: VVVGAGDVG (KRAS G13D)
WVVFADDVM

SEQ ID NO: 95314 - protein, 9 aa, synthetic construct
  source 1..9: note = Seed: VVVGAGDVG (KRAS G13D)
WVVFADDVV

SEQ ID NO: 95315 - protein, 9 aa, synthetic construct
  source 1..9: note = Seed: VVVGAGDVG (KRAS G13D)
WVVFADDVY

SEQ ID NO: 95316 - protein, 9 aa, synthetic construct
  source 1..9: note = Seed: VVVGAGDVG (KRAS G13D)
WVVFAGDVA

SEQ ID NO: 95317 - protein, 9 aa, synthetic construct
  source 1..9: note = Seed: VVVGAGDVG (KRAS G13D)
WVVFAHDVA

SEQ ID NO: 95318 - protein, 9 aa, synthetic construct
  source 1..9: note = Seed: VVVGAGDVG (KRAS G13D)
WVVFAIDVA

SEQ ID NO: 95319 - protein, 9 aa, synthetic construct
  source 1..9: note = Seed: VVVGAGDVG (KRAS G13D)
WVVFAIDVS

SEQ ID NO: 95320 - protein, 9 aa, synthetic construct
  source 1..9: note = Seed: VVVGAGDVG (KRAS G13D)
WVVFANDVA

SEQ ID NO: 95321 - protein, 9 aa, synthetic construct
  source 1..9: note = Seed: VVVGAGDVG (KRAS G13D)
WVVFANDVH

SEQ ID NO: 95322 - protein, 9 aa, synthetic construct
  source 1..9: note = Seed: VVVGAGDVG (KRAS G13D)
WVVFANDVI

SEQ ID NO: 95323 - protein, 9 aa, synthetic construct
  source 1..9: note = Seed: VVVGAGDVG (KRAS G13D)
WVVFANDVL

SEQ ID NO: 95324 - protein, 9 aa, synthetic construct
  source 1..9: note = Seed: VVVGAGDVG (KRAS G13D)
WVVFANDVM

SEQ ID NO: 95325 - protein, 9 aa, synthetic construct
  source 1..9: note = Seed: VVVGAGDVG (KRAS G13D)
WVVFANDVN

SEQ ID NO: 95326 - protein, 9 aa, synthetic construct
  source 1..9: note = Seed: VVVGAGDVG (KRAS G13D)
WVVFANDVS

SEQ ID NO: 95327 - protein, 9 aa, synthetic construct
  source 1..9: note = Seed: VVVGAGDVG (KRAS G13D)
WVVFANDVV

SEQ ID NO: 95328 - protein, 9 aa, synthetic construct
  source 1..9: note = Seed: VVVGAGDVG (KRAS G13D)
WVVFANDVY

SEQ ID NO: 95329 - protein, 9 aa, synthetic construct
  source 1..9: note = Seed: VVVGAGDVG (KRAS G13D)
WVVFAPDVA

SEQ ID NO: 95330 - protein, 9 aa, synthetic construct
  source 1..9: note = Seed: VVVGAGDVG (KRAS G13D)
WVVFAPDVG

SEQ ID NO: 95331 - protein, 9 aa, synthetic construct
  source 1..9: note = Seed: VVVGAGDVG (KRAS G13D)
WVVFAPDVH

SEQ ID NO: 95332 - protein, 9 aa, synthetic construct
  source 1..9: note = Seed: VVVGAGDVG (KRAS G13D)
WVVFAPDVI

SEQ ID NO: 95333 - protein, 9 aa, synthetic construct
  source 1..9: note = Seed: VVVGAGDVG (KRAS G13D)
WVVFAPDVM

SEQ ID NO: 95334 - protein, 9 aa, synthetic construct
  source 1..9: note = Seed: VVVGAGDVG (KRAS G13D)
WVVFAPDVN

SEQ ID NO: 95335 - protein, 9 aa, synthetic construct
  source 1..9: note = Seed: VVVGAGDVG (KRAS G13D)
WVVFAPDVQ

SEQ ID NO: 95336 - protein, 9 aa, synthetic construct
  source 1..9: note = Seed: VVVGAGDVG (KRAS G13D)
WVVFAPDVS

SEQ ID NO: 95337 - protein, 9 aa, synthetic construct
  source 1..9: note = Seed: VVVGAGDVG (KRAS G13D)
WVVFAPDVT

SEQ ID NO: 95338 - protein, 9 aa, synthetic construct
  source 1..9: note = Seed: VVVGAGDVG (KRAS G13D)
WVVFAPDVV

SEQ ID NO: 95339 - protein, 9 aa, synthetic construct
  source 1..9: note = Seed: VVVGAGDVG (KRAS G13D)
WVVFASDVA

SEQ ID NO: 95340 - protein, 9 aa, synthetic construct
  source 1..9: note = Seed: VVVGAGDVG (KRAS G13D)
WVVFASDVH

SEQ ID NO: 95341 - protein, 9 aa, synthetic construct
  source 1..9: note = Seed: VVVGAGDVG (KRAS G13D)
WVVFASDVL

SEQ ID NO: 95342 - protein, 9 aa, synthetic construct
  source 1..9: note = Seed: VVVGAGDVG (KRAS G13D)
WVVFASDVM

SEQ ID NO: 95343 - protein, 9 aa, synthetic construct
  source 1..9: note = Seed: VVVGAGDVG (KRAS G13D)
WVVFASDVN

SEQ ID NO: 95344 - protein, 9 aa, synthetic construct
  source 1..9: note = Seed: VVVGAGDVG (KRAS G13D)
WVVFASDVQ

SEQ ID NO: 95345 - protein, 9 aa, synthetic construct
  source 1..9: note = Seed: VVVGAGDVG (KRAS G13D)
WVVFASDVS

SEQ ID NO: 95346 - protein, 9 aa, synthetic construct
  source 1..9: note = Seed: VVVGAGDVG (KRAS G13D)
WVVFASDVT

SEQ ID NO: 95347 - protein, 9 aa, synthetic construct
  source 1..9: note = Seed: VVVGAGDVG (KRAS G13D)
WVVFASDVV

SEQ ID NO: 95348 - protein, 9 aa, synthetic construct
  source 1..9: note = Seed: VVVGAGDVG (KRAS G13D)
WVVFATDVA

SEQ ID NO: 95349 - protein, 9 aa, synthetic construct
  source 1..9: note = Seed: VVVGAGDVG (KRAS G13D)
WVVFATDVH

SEQ ID NO: 95350 - protein, 9 aa, synthetic construct
  source 1..9: note = Seed: VVVGAGDVG (KRAS G13D)
WVVFATDVL

SEQ ID NO: 95351 - protein, 9 aa, synthetic construct
  source 1..9: note = Seed: VVVGAGDVG (KRAS G13D)
WVVFATDVM

SEQ ID NO: 95352 - protein, 9 aa, synthetic construct
  source 1..9: note = Seed: VVVGAGDVG (KRAS G13D)
WVVFATDVN

SEQ ID NO: 95353 - protein, 9 aa, synthetic construct
  source 1..9: note = Seed: VVVGAGDVG (KRAS G13D)
WVVFATDVQ

SEQ ID NO: 95354 - protein, 9 aa, synthetic construct
  source 1..9: note = Seed: VVVGAGDVG (KRAS G13D)
WVVFATDVS

SEQ ID NO: 95355 - protein, 9 aa, synthetic construct
  source 1..9: note = Seed: VVVGAGDVG (KRAS G13D)
WVVFATDVT

SEQ ID NO: 95356 - protein, 9 aa, synthetic construct
  source 1..9: note = Seed: VVVGAGDVG (KRAS G13D)
WVVFATDVV

SEQ ID NO: 95357 - protein, 9 aa, synthetic construct
  source 1..9: note = Seed: VVVGAGDVG (KRAS G13D)
WVVFAVDVA

SEQ ID NO: 95358 - protein, 9 aa, synthetic construct
  source 1..9: note = Seed: VVVGAGDVG (KRAS G13D)
WVVFAVDVH

SEQ ID NO: 95359 - protein, 9 aa, synthetic construct
  source 1..9: note = Seed: VVVGAGDVG (KRAS G13D)
WVVFAVDVN

SEQ ID NO: 95360 - protein, 9 aa, synthetic construct
  source 1..9: note = Seed: VVVGAGDVG (KRAS G13D)
WVVFAVDVS

SEQ ID NO: 95361 - protein, 9 aa, synthetic construct
  source 1..9: note = Seed: VVVGAGDVG (KRAS G13D)
WVVGAADVA

SEQ ID NO: 95362 - protein, 9 aa, synthetic construct
  source 1..9: note = Seed: VVVGAGDVG (KRAS G13D)
WVVGAADVL

SEQ ID NO: 95363 - protein, 9 aa, synthetic construct
  source 1..9: note = Seed: VVVGAGDVG (KRAS G13D)
WVVGAADVM

SEQ ID NO: 95364 - protein, 9 aa, synthetic construct
  source 1..9: note = Seed: VVVGAGDVG (KRAS G13D)
WVVGAADVN

SEQ ID NO: 95365 - protein, 9 aa, synthetic construct
  source 1..9: note = Seed: VVVGAGDVG (KRAS G13D)
WVVGAADVS

SEQ ID NO: 95366 - protein, 9 aa, synthetic construct
  source 1..9: note = Seed: VVVGAGDVG (KRAS G13D)
WVVGAADVV

SEQ ID NO: 95367 - protein, 9 aa, synthetic construct
  source 1..9: note = Seed: VVVGAGDVG (KRAS G13D)
WVVGAADVY

SEQ ID NO: 95368 - protein, 9 aa, synthetic construct
  source 1..9: note = Seed: VVVGAGDVG (KRAS G13D)
WVVGAIDVA

SEQ ID NO: 95369 - protein, 9 aa, synthetic construct
  source 1..9: note = Seed: VVVGAGDVG (KRAS G13D)
WVVGAIDVN

SEQ ID NO: 95370 - protein, 9 aa, synthetic construct
  source 1..9: note = Seed: VVVGAGDVG (KRAS G13D)
WVVGAIDVS

SEQ ID NO: 95371 - protein, 9 aa, synthetic construct
  source 1..9: note = Seed: VVVGAGDVG (KRAS G13D)
WVVGANDVA

SEQ ID NO: 95372 - protein, 9 aa, synthetic construct
  source 1..9: note = Seed: VVVGAGDVG (KRAS G13D)
WVVGASDVA

SEQ ID NO: 95373 - protein, 9 aa, synthetic construct
  source 1..9: note = Seed: VVVGAGDVG (KRAS G13D)
WVVGATDVA

SEQ ID NO: 95374 - protein, 9 aa, synthetic construct
  source 1..9: note = Seed: VVVGAGDVG (KRAS G13D)
WVVGAVDVA

SEQ ID NO: 95375 - protein, 9 aa, synthetic construct
  source 1..9: note = Seed: VVVGAGDVG (KRAS G13D)
WVVGAVDVN

SEQ ID NO: 95376 - protein, 9 aa, synthetic construct
  source 1..9: note = Seed: VVVGAGDVG (KRAS G13D)
WVVGAVDVS

SEQ ID NO: 95377 - protein, 9 aa, synthetic construct
  source 1..9: note = Seed: VVVGAGDVG (KRAS G13D)
WVVHAADVA

SEQ ID NO: 95378 - protein, 9 aa, synthetic construct
  source 1..9: note = Seed: VVVGAGDVG (KRAS G13D)
WVVHAADVH

SEQ ID NO: 95379 - protein, 9 aa, synthetic construct
  source 1..9: note = Seed: VVVGAGDVG (KRAS G13D)
WVVHAADVI

SEQ ID NO: 95380 - protein, 9 aa, synthetic construct
  source 1..9: note = Seed: VVVGAGDVG (KRAS G13D)
WVVHAADVM

SEQ ID NO: 95381 - protein, 9 aa, synthetic construct
  source 1..9: note = Seed: VVVGAGDVG (KRAS G13D)
WVVHAADVN

SEQ ID NO: 95382 - protein, 9 aa, synthetic construct
  source 1..9: note = Seed: VVVGAGDVG (KRAS G13D)
WVVHAADVQ

SEQ ID NO: 95383 - protein, 9 aa, synthetic construct
  source 1..9: note = Seed: VVVGAGDVG (KRAS G13D)
WVVHAADVS

SEQ ID NO: 95384 - protein, 9 aa, synthetic construct
  source 1..9: note = Seed: VVVGAGDVG (KRAS G13D)
WVVHAADVT

SEQ ID NO: 95385 - protein, 9 aa, synthetic construct
  source 1..9: note = Seed: VVVGAGDVG (KRAS G13D)
WVVHAADVV

SEQ ID NO: 95386 - protein, 9 aa, synthetic construct
  source 1..9: note = Seed: VVVGAGDVG (KRAS G13D)
WVVHAIDVS

SEQ ID NO: 95387 - protein, 9 aa, synthetic construct
  source 1..9: note = Seed: VVVGAGDVG (KRAS G13D)
WVVHANDVA

SEQ ID NO: 95388 - protein, 9 aa, synthetic construct
  source 1..9: note = Seed: VVVGAGDVG (KRAS G13D)
WVVHANDVS

SEQ ID NO: 95389 - protein, 9 aa, synthetic construct
  source 1..9: note = Seed: VVVGAGDVG (KRAS G13D)
WVVHASDVA

SEQ ID NO: 95390 - protein, 9 aa, synthetic construct
  source 1..9: note = Seed: VVVGAGDVG (KRAS G13D)
WVVHASDVL

SEQ ID NO: 95391 - protein, 9 aa, synthetic construct
  source 1..9: note = Seed: VVVGAGDVG (KRAS G13D)
WVVHASDVV

SEQ ID NO: 95392 - protein, 9 aa, synthetic construct
  source 1..9: note = Seed: VVVGAGDVG (KRAS G13D)
WVVHATDVA

SEQ ID NO: 95393 - protein, 9 aa, synthetic construct
  source 1..9: note = Seed: VVVGAGDVG (KRAS G13D)
WVVHAVDVA

SEQ ID NO: 95394 - protein, 9 aa, synthetic construct
  source 1..9: note = Seed: VVVGAGDVG (KRAS G13D)
WVVHAVDVI

SEQ ID NO: 95395 - protein, 9 aa, synthetic construct
  source 1..9: note = Seed: VVVGAGDVG (KRAS G13D)
WVVHAVDVL

SEQ ID NO: 95396 - protein, 9 aa, synthetic construct
  source 1..9: note = Seed: VVVGAGDVG (KRAS G13D)
WVVHAVDVM

SEQ ID NO: 95397 - protein, 9 aa, synthetic construct
  source 1..9: note = Seed: VVVGAGDVG (KRAS G13D)
WVVHAVDVN

SEQ ID NO: 95398 - protein, 9 aa, synthetic construct
  source 1..9: note = Seed: VVVGAGDVG (KRAS G13D)
WVVHAVDVS

SEQ ID NO: 95399 - protein, 9 aa, synthetic construct
  source 1..9: note = Seed: VVVGAGDVG (KRAS G13D)
WVVHAVDVV

SEQ ID NO: 95400 - protein, 9 aa, synthetic construct
  source 1..9: note = Seed: VVVGAGDVG (KRAS G13D)
WVVIAADVA

SEQ ID NO: 95401 - protein, 9 aa, synthetic construct
  source 1..9: note = Seed: VVVGAGDVG (KRAS G13D)
WVVIAADVD

SEQ ID NO: 95402 - protein, 9 aa, synthetic construct
  source 1..9: note = Seed: VVVGAGDVG (KRAS G13D)
WVVIAADVE

SEQ ID NO: 95403 - protein, 9 aa, synthetic construct
  source 1..9: note = Seed: VVVGAGDVG (KRAS G13D)
WVVIAADVF

SEQ ID NO: 95404 - protein, 9 aa, synthetic construct
  source 1..9: note = Seed: VVVGAGDVG (KRAS G13D)
WVVIAADVG

SEQ ID NO: 95405 - protein, 9 aa, synthetic construct
  source 1..9: note = Seed: VVVGAGDVG (KRAS G13D)
WVVIAADVH

SEQ ID NO: 95406 - protein, 9 aa, synthetic construct
  source 1..9: note = Seed: VVVGAGDVG (KRAS G13D)
WVVIAADVI

SEQ ID NO: 95407 - protein, 9 aa, synthetic construct
  source 1..9: note = Seed: VVVGAGDVG (KRAS G13D)
WVVIAADVK

SEQ ID NO: 95408 - protein, 9 aa, synthetic construct
  source 1..9: note = Seed: VVVGAGDVG (KRAS G13D)
WVVIAADVL

SEQ ID NO: 95409 - protein, 9 aa, synthetic construct
  source 1..9: note = Seed: VVVGAGDVG (KRAS G13D)
WVVIAADVM

SEQ ID NO: 95410 - protein, 9 aa, synthetic construct
  source 1..9: note = Seed: VVVGAGDVG (KRAS G13D)
WVVIAADVN

SEQ ID NO: 95411 - protein, 9 aa, synthetic construct
  source 1..9: note = Seed: VVVGAGDVG (KRAS G13D)
WVVIAADVP

SEQ ID NO: 95412 - protein, 9 aa, synthetic construct
  source 1..9: note = Seed: VVVGAGDVG (KRAS G13D)
WVVIAADVQ

SEQ ID NO: 95413 - protein, 9 aa, synthetic construct
  source 1..9: note = Seed: VVVGAGDVG (KRAS G13D)
WVVIAADVR

SEQ ID NO: 95414 - protein, 9 aa, synthetic construct
  source 1..9: note = Seed: VVVGAGDVG (KRAS G13D)
WVVIAADVS

SEQ ID NO: 95415 - protein, 9 aa, synthetic construct
  source 1..9: note = Seed: VVVGAGDVG (KRAS G13D)
WVVIAADVT

SEQ ID NO: 95416 - protein, 9 aa, synthetic construct
  source 1..9: note = Seed: VVVGAGDVG (KRAS G13D)
WVVIAADVV

SEQ ID NO: 95417 - protein, 9 aa, synthetic construct
  source 1..9: note = Seed: VVVGAGDVG (KRAS G13D)
WVVIAADVY

SEQ ID NO: 95418 - protein, 9 aa, synthetic construct
  source 1..9: note = Seed: VVVGAGDVG (KRAS G13D)
WVVIADDVA

SEQ ID NO: 95419 - protein, 9 aa, synthetic construct
  source 1..9: note = Seed: VVVGAGDVG (KRAS G13D)
WVVIAEDVA

SEQ ID NO: 95420 - protein, 9 aa, synthetic construct
  source 1..9: note = Seed: VVVGAGDVG (KRAS G13D)
WVVIAGDVA

SEQ ID NO: 95421 - protein, 9 aa, synthetic construct
  source 1..9: note = Seed: VVVGAGDVG (KRAS G13D)
WVVIAGDVH

SEQ ID NO: 95422 - protein, 9 aa, synthetic construct
  source 1..9: note = Seed: VVVGAGDVG (KRAS G13D)
WVVIAGDVL

SEQ ID NO: 95423 - protein, 9 aa, synthetic construct
  source 1..9: note = Seed: VVVGAGDVG (KRAS G13D)
WVVIAGDVM

SEQ ID NO: 95424 - protein, 9 aa, synthetic construct
  source 1..9: note = Seed: VVVGAGDVG (KRAS G13D)
WVVIAGDVN

SEQ ID NO: 95425 - protein, 9 aa, synthetic construct
  source 1..9: note = Seed: VVVGAGDVG (KRAS G13D)
WVVIAGDVQ

SEQ ID NO: 95426 - protein, 9 aa, synthetic construct
  source 1..9: note = Seed: VVVGAGDVG (KRAS G13D)
WVVIAGDVS

SEQ ID NO: 95427 - protein, 9 aa, synthetic construct
  source 1..9: note = Seed: VVVGAGDVG (KRAS G13D)
WVVIAGDVT

SEQ ID NO: 95428 - protein, 9 aa, synthetic construct
  source 1..9: note = Seed: VVVGAGDVG (KRAS G13D)
WVVIAGDVV

SEQ ID NO: 95429 - protein, 9 aa, synthetic construct
  source 1..9: note = Seed: VVVGAGDVG (KRAS G13D)
WVVIAHDVA

SEQ ID NO: 95430 - protein, 9 aa, synthetic construct
  source 1..9: note = Seed: VVVGAGDVG (KRAS G13D)
WVVIAHDVH

SEQ ID NO: 95431 - protein, 9 aa, synthetic construct
  source 1..9: note = Seed: VVVGAGDVG (KRAS G13D)
WVVIAHDVN

SEQ ID NO: 95432 - protein, 9 aa, synthetic construct
  source 1..9: note = Seed: VVVGAGDVG (KRAS G13D)
WVVIAHDVQ

SEQ ID NO: 95433 - protein, 9 aa, synthetic construct
  source 1..9: note = Seed: VVVGAGDVG (KRAS G13D)
WVVIAHDVS

SEQ ID NO: 95434 - protein, 9 aa, synthetic construct
  source 1..9: note = Seed: VVVGAGDVG (KRAS G13D)
WVVIAIDVA

SEQ ID NO: 95435 - protein, 9 aa, synthetic construct
  source 1..9: note = Seed: VVVGAGDVG (KRAS G13D)
WVVIAIDVH

SEQ ID NO: 95436 - protein, 9 aa, synthetic construct
  source 1..9: note = Seed: VVVGAGDVG (KRAS G13D)
WVVIAIDVK

SEQ ID NO: 95437 - protein, 9 aa, synthetic construct
  source 1..9: note = Seed: VVVGAGDVG (KRAS G13D)
WVVIAIDVN

SEQ ID NO: 95438 - protein, 9 aa, synthetic construct
  source 1..9: note = Seed: VVVGAGDVG (KRAS G13D)
WVVIAIDVQ

SEQ ID NO: 95439 - protein, 9 aa, synthetic construct
  source 1..9: note = Seed: VVVGAGDVG (KRAS G13D)
WVVIAIDVR

SEQ ID NO: 95440 - protein, 9 aa, synthetic construct
  source 1..9: note = Seed: VVVGAGDVG (KRAS G13D)
WVVIAIDVS

SEQ ID NO: 95441 - protein, 9 aa, synthetic construct
  source 1..9: note = Seed: VVVGAGDVG (KRAS G13D)
WVVIAIDVT

SEQ ID NO: 95442 - protein, 9 aa, synthetic construct
  source 1..9: note = Seed: VVVGAGDVG (KRAS G13D)
WVVIALDVG

SEQ ID NO: 95443 - protein, 9 aa, synthetic construct
  source 1..9: note = Seed: VVVGAGDVG (KRAS G13D)
WVVIAMDVG

SEQ ID NO: 95444 - protein, 9 aa, synthetic construct
  source 1..9: note = Seed: VVVGAGDVG (KRAS G13D)
WVVIAMDVM

SEQ ID NO: 95445 - protein, 9 aa, synthetic construct
  source 1..9: note = Seed: VVVGAGDVG (KRAS G13D)
WVVIANDVA

SEQ ID NO: 95446 - protein, 9 aa, synthetic construct
  source 1..9: note = Seed: VVVGAGDVG (KRAS G13D)
WVVIANDVD

SEQ ID NO: 95447 - protein, 9 aa, synthetic construct
  source 1..9: note = Seed: VVVGAGDVG (KRAS G13D)
WVVIANDVE

SEQ ID NO: 95448 - protein, 9 aa, synthetic construct
  source 1..9: note = Seed: VVVGAGDVG (KRAS G13D)
WVVIANDVG

SEQ ID NO: 95449 - protein, 9 aa, synthetic construct
  source 1..9: note = Seed: VVVGAGDVG (KRAS G13D)
WVVIANDVH

SEQ ID NO: 95450 - protein, 9 aa, synthetic construct
  source 1..9: note = Seed: VVVGAGDVG (KRAS G13D)
WVVIANDVI

SEQ ID NO: 95451 - protein, 9 aa, synthetic construct
  source 1..9: note = Seed: VVVGAGDVG (KRAS G13D)
WVVIANDVK

SEQ ID NO: 95452 - protein, 9 aa, synthetic construct
  source 1..9: note = Seed: VVVGAGDVG (KRAS G13D)
WVVIANDVL

SEQ ID NO: 95453 - protein, 9 aa, synthetic construct
  source 1..9: note = Seed: VVVGAGDVG (KRAS G13D)
WVVIANDVM

SEQ ID NO: 95454 - protein, 9 aa, synthetic construct
  source 1..9: note = Seed: VVVGAGDVG (KRAS G13D)
WVVIANDVN

SEQ ID NO: 95455 - protein, 9 aa, synthetic construct
  source 1..9: note = Seed: VVVGAGDVG (KRAS G13D)
WVVIANDVP

SEQ ID NO: 95456 - protein, 9 aa, synthetic construct
  source 1..9: note = Seed: VVVGAGDVG (KRAS G13D)
WVVIANDVQ

SEQ ID NO: 95457 - protein, 9 aa, synthetic construct
  source 1..9: note = Seed: VVVGAGDVG (KRAS G13D)
WVVIANDVR

SEQ ID NO: 95458 - protein, 9 aa, synthetic construct
  source 1..9: note = Seed: VVVGAGDVG (KRAS G13D)
WVVIANDVS

SEQ ID NO: 95459 - protein, 9 aa, synthetic construct
  source 1..9: note = Seed: VVVGAGDVG (KRAS G13D)
WVVIANDVT

SEQ ID NO: 95460 - protein, 9 aa, synthetic construct
  source 1..9: note = Seed: VVVGAGDVG (KRAS G13D)
WVVIANDVV

SEQ ID NO: 95461 - protein, 9 aa, synthetic construct
  source 1..9: note = Seed: VVVGAGDVG (KRAS G13D)
WVVIANDVY

SEQ ID NO: 95462 - protein, 9 aa, synthetic construct
  source 1..9: note = Seed: VVVGAGDVG (KRAS G13D)
WVVIAPDVA

SEQ ID NO: 95463 - protein, 9 aa, synthetic construct
  source 1..9: note = Seed: VVVGAGDVG (KRAS G13D)
WVVIAPDVD

SEQ ID NO: 95464 - protein, 9 aa, synthetic construct
  source 1..9: note = Seed: VVVGAGDVG (KRAS G13D)
WVVIAPDVE

SEQ ID NO: 95465 - protein, 9 aa, synthetic construct
  source 1..9: note = Seed: VVVGAGDVG (KRAS G13D)
WVVIAPDVF

SEQ ID NO: 95466 - protein, 9 aa, synthetic construct
  source 1..9: note = Seed: VVVGAGDVG (KRAS G13D)
WVVIAPDVG

SEQ ID NO: 95467 - protein, 9 aa, synthetic construct
  source 1..9: note = Seed: VVVGAGDVG (KRAS G13D)
WVVIAPDVH

SEQ ID NO: 95468 - protein, 9 aa, synthetic construct
  source 1..9: note = Seed: VVVGAGDVG (KRAS G13D)
WVVIAPDVI

SEQ ID NO: 95469 - protein, 9 aa, synthetic construct
  source 1..9: note = Seed: VVVGAGDVG (KRAS G13D)
WVVIAPDVK

SEQ ID NO: 95470 - protein, 9 aa, synthetic construct
  source 1..9: note = Seed: VVVGAGDVG (KRAS G13D)
WVVIAPDVL

SEQ ID NO: 95471 - protein, 9 aa, synthetic construct
  source 1..9: note = Seed: VVVGAGDVG (KRAS G13D)
WVVIAPDVM

SEQ ID NO: 95472 - protein, 9 aa, synthetic construct
  source 1..9: note = Seed: VVVGAGDVG (KRAS G13D)
WVVIAPDVN

SEQ ID NO: 95473 - protein, 9 aa, synthetic construct
  source 1..9: note = Seed: VVVGAGDVG (KRAS G13D)
WVVIAPDVP

SEQ ID NO: 95474 - protein, 9 aa, synthetic construct
  source 1..9: note = Seed: VVVGAGDVG (KRAS G13D)
WVVIAPDVQ

SEQ ID NO: 95475 - protein, 9 aa, synthetic construct
  source 1..9: note = Seed: VVVGAGDVG (KRAS G13D)
WVVIAPDVR

SEQ ID NO: 95476 - protein, 9 aa, synthetic construct
  source 1..9: note = Seed: VVVGAGDVG (KRAS G13D)
WVVIAPDVS

SEQ ID NO: 95477 - protein, 9 aa, synthetic construct
  source 1..9: note = Seed: VVVGAGDVG (KRAS G13D)
WVVIAPDVT

SEQ ID NO: 95478 - protein, 9 aa, synthetic construct
  source 1..9: note = Seed: VVVGAGDVG (KRAS G13D)
WVVIAPDVV

SEQ ID NO: 95479 - protein, 9 aa, synthetic construct
  source 1..9: note = Seed: VVVGAGDVG (KRAS G13D)
WVVIAPDVY

SEQ ID NO: 95480 - protein, 9 aa, synthetic construct
  source 1..9: note = Seed: VVVGAGDVG (KRAS G13D)
WVVIAQDVA

SEQ ID NO: 95481 - protein, 9 aa, synthetic construct
  source 1..9: note = Seed: VVVGAGDVG (KRAS G13D)
WVVIAQDVN

SEQ ID NO: 95482 - protein, 9 aa, synthetic construct
  source 1..9: note = Seed: VVVGAGDVG (KRAS G13D)
WVVIAQDVS

SEQ ID NO: 95483 - protein, 9 aa, synthetic construct
  source 1..9: note = Seed: VVVGAGDVG (KRAS G13D)
WVVIASDVA

SEQ ID NO: 95484 - protein, 9 aa, synthetic construct
  source 1..9: note = Seed: VVVGAGDVG (KRAS G13D)
WVVIASDVD

SEQ ID NO: 95485 - protein, 9 aa, synthetic construct
  source 1..9: note = Seed: VVVGAGDVG (KRAS G13D)
WVVIASDVE

SEQ ID NO: 95486 - protein, 9 aa, synthetic construct
  source 1..9: note = Seed: VVVGAGDVG (KRAS G13D)
WVVIASDVG

SEQ ID NO: 95487 - protein, 9 aa, synthetic construct
  source 1..9: note = Seed: VVVGAGDVG (KRAS G13D)
WVVIASDVH

SEQ ID NO: 95488 - protein, 9 aa, synthetic construct
  source 1..9: note = Seed: VVVGAGDVG (KRAS G13D)
WVVIASDVI

SEQ ID NO: 95489 - protein, 9 aa, synthetic construct
  source 1..9: note = Seed: VVVGAGDVG (KRAS G13D)
WVVIASDVK

SEQ ID NO: 95490 - protein, 9 aa, synthetic construct
  source 1..9: note = Seed: VVVGAGDVG (KRAS G13D)
WVVIASDVL

SEQ ID NO: 95491 - protein, 9 aa, synthetic construct
  source 1..9: note = Seed: VVVGAGDVG (KRAS G13D)
WVVIASDVM

SEQ ID NO: 95492 - protein, 9 aa, synthetic construct
  source 1..9: note = Seed: VVVGAGDVG (KRAS G13D)
WVVIASDVN

SEQ ID NO: 95493 - protein, 9 aa, synthetic construct
  source 1..9: note = Seed: VVVGAGDVG (KRAS G13D)
WVVIASDVP

SEQ ID NO: 95494 - protein, 9 aa, synthetic construct
  source 1..9: note = Seed: VVVGAGDVG (KRAS G13D)
WVVIASDVQ

SEQ ID NO: 95495 - protein, 9 aa, synthetic construct
  source 1..9: note = Seed: VVVGAGDVG (KRAS G13D)
WVVIASDVR

SEQ ID NO: 95496 - protein, 9 aa, synthetic construct
  source 1..9: note = Seed: VVVGAGDVG (KRAS G13D)
WVVIASDVS

SEQ ID NO: 95497 - protein, 9 aa, synthetic construct
  source 1..9: note = Seed: VVVGAGDVG (KRAS G13D)
WVVIASDVT

SEQ ID NO: 95498 - protein, 9 aa, synthetic construct
  source 1..9: note = Seed: VVVGAGDVG (KRAS G13D)
WVVIASDVV

SEQ ID NO: 95499 - protein, 9 aa, synthetic construct
  source 1..9: note = Seed: VVVGAGDVG (KRAS G13D)
WVVIASDVY

SEQ ID NO: 95500 - protein, 9 aa, synthetic construct
  source 1..9: note = Seed: VVVGAGDVG (KRAS G13D)
WVVIATDVA

SEQ ID NO: 95501 - protein, 9 aa, synthetic construct
  source 1..9: note = Seed: VVVGAGDVG (KRAS G13D)
WVVIATDVG

SEQ ID NO: 95502 - protein, 9 aa, synthetic construct
  source 1..9: note = Seed: VVVGAGDVG (KRAS G13D)
WVVIATDVH

SEQ ID NO: 95503 - protein, 9 aa, synthetic construct
  source 1..9: note = Seed: VVVGAGDVG (KRAS G13D)
WVVIATDVI

SEQ ID NO: 95504 - protein, 9 aa, synthetic construct
  source 1..9: note = Seed: VVVGAGDVG (KRAS G13D)
WVVIATDVK

SEQ ID NO: 95505 - protein, 9 aa, synthetic construct
  source 1..9: note = Seed: VVVGAGDVG (KRAS G13D)
WVVIATDVL

SEQ ID NO: 95506 - protein, 9 aa, synthetic construct
  source 1..9: note = Seed: VVVGAGDVG (KRAS G13D)
WVVIATDVM

SEQ ID NO: 95507 - protein, 9 aa, synthetic construct
  source 1..9: note = Seed: VVVGAGDVG (KRAS G13D)
WVVIATDVN

SEQ ID NO: 95508 - protein, 9 aa, synthetic construct
  source 1..9: note = Seed: VVVGAGDVG (KRAS G13D)
WVVIATDVP

SEQ ID NO: 95509 - protein, 9 aa, synthetic construct
  source 1..9: note = Seed: VVVGAGDVG (KRAS G13D)
WVVIATDVQ

SEQ ID NO: 95510 - protein, 9 aa, synthetic construct
  source 1..9: note = Seed: VVVGAGDVG (KRAS G13D)
WVVIATDVR

SEQ ID NO: 95511 - protein, 9 aa, synthetic construct
  source 1..9: note = Seed: VVVGAGDVG (KRAS G13D)
WVVIATDVS

SEQ ID NO: 95512 - protein, 9 aa, synthetic construct
  source 1..9: note = Seed: VVVGAGDVG (KRAS G13D)
WVVIATDVT

SEQ ID NO: 95513 - protein, 9 aa, synthetic construct
  source 1..9: note = Seed: VVVGAGDVG (KRAS G13D)
WVVIATDVV

SEQ ID NO: 95514 - protein, 9 aa, synthetic construct
  source 1..9: note = Seed: VVVGAGDVG (KRAS G13D)
WVVIATDVY

SEQ ID NO: 95515 - protein, 9 aa, synthetic construct
  source 1..9: note = Seed: VVVGAGDVG (KRAS G13D)
WVVIAVDVA

SEQ ID NO: 95516 - protein, 9 aa, synthetic construct
  source 1..9: note = Seed: VVVGAGDVG (KRAS G13D)
WVVIAVDVH

SEQ ID NO: 95517 - protein, 9 aa, synthetic construct
  source 1..9: note = Seed: VVVGAGDVG (KRAS G13D)
WVVIAVDVK

SEQ ID NO: 95518 - protein, 9 aa, synthetic construct
  source 1..9: note = Seed: VVVGAGDVG (KRAS G13D)
WVVIAVDVN

SEQ ID NO: 95519 - protein, 9 aa, synthetic construct
  source 1..9: note = Seed: VVVGAGDVG (KRAS G13D)
WVVIAVDVP

SEQ ID NO: 95520 - protein, 9 aa, synthetic construct
  source 1..9: note = Seed: VVVGAGDVG (KRAS G13D)
WVVIAVDVQ

SEQ ID NO: 95521 - protein, 9 aa, synthetic construct
  source 1..9: note = Seed: VVVGAGDVG (KRAS G13D)
WVVIAVDVR

SEQ ID NO: 95522 - protein, 9 aa, synthetic construct
  source 1..9: note = Seed: VVVGAGDVG (KRAS G13D)
WVVIAVDVS

SEQ ID NO: 95523 - protein, 9 aa, synthetic construct
  source 1..9: note = Seed: VVVGAGDVG (KRAS G13D)
WVVIAVDVT

SEQ ID NO: 95524 - protein, 9 aa, synthetic construct
  source 1..9: note = Seed: VVVGAGDVG (KRAS G13D)
WVVKAADVA

SEQ ID NO: 95525 - protein, 9 aa, synthetic construct
  source 1..9: note = Seed: VVVGAGDVG (KRAS G13D)
WVVKAADVE

SEQ ID NO: 95526 - protein, 9 aa, synthetic construct
  source 1..9: note = Seed: VVVGAGDVG (KRAS G13D)
WVVKAADVH

SEQ ID NO: 95527 - protein, 9 aa, synthetic construct
  source 1..9: note = Seed: VVVGAGDVG (KRAS G13D)
WVVKAADVM

SEQ ID NO: 95528 - protein, 9 aa, synthetic construct
  source 1..9: note = Seed: VVVGAGDVG (KRAS G13D)
WVVKAADVN

SEQ ID NO: 95529 - protein, 9 aa, synthetic construct
  source 1..9: note = Seed: VVVGAGDVG (KRAS G13D)
WVVKAADVQ

SEQ ID NO: 95530 - protein, 9 aa, synthetic construct
  source 1..9: note = Seed: VVVGAGDVG (KRAS G13D)
WVVKAADVS

SEQ ID NO: 95531 - protein, 9 aa, synthetic construct
  source 1..9: note = Seed: VVVGAGDVG (KRAS G13D)
WVVKAADVT

SEQ ID NO: 95532 - protein, 9 aa, synthetic construct
  source 1..9: note = Seed: VVVGAGDVG (KRAS G13D)
WVVKAADVV

SEQ ID NO: 95533 - protein, 9 aa, synthetic construct
  source 1..9: note = Seed: VVVGAGDVG (KRAS G13D)
WVVKANDVA

SEQ ID NO: 95534 - protein, 9 aa, synthetic construct
  source 1..9: note = Seed: VVVGAGDVG (KRAS G13D)
WVVKANDVS

SEQ ID NO: 95535 - protein, 9 aa, synthetic construct
  source 1..9: note = Seed: VVVGAGDVG (KRAS G13D)
WVVKASDVA

SEQ ID NO: 95536 - protein, 9 aa, synthetic construct
  source 1..9: note = Seed: VVVGAGDVG (KRAS G13D)
WVVKASDVI

SEQ ID NO: 95537 - protein, 9 aa, synthetic construct
  source 1..9: note = Seed: VVVGAGDVG (KRAS G13D)
WVVKASDVL

SEQ ID NO: 95538 - protein, 9 aa, synthetic construct
  source 1..9: note = Seed: VVVGAGDVG (KRAS G13D)
WVVKASDVM

SEQ ID NO: 95539 - protein, 9 aa, synthetic construct
  source 1..9: note = Seed: VVVGAGDVG (KRAS G13D)
WVVKASDVV

SEQ ID NO: 95540 - protein, 9 aa, synthetic construct
  source 1..9: note = Seed: VVVGAGDVG (KRAS G13D)
WVVKATDVA

SEQ ID NO: 95541 - protein, 9 aa, synthetic construct
  source 1..9: note = Seed: VVVGAGDVG (KRAS G13D)
WVVKATDVL

SEQ ID NO: 95542 - protein, 9 aa, synthetic construct
  source 1..9: note = Seed: VVVGAGDVG (KRAS G13D)
WVVKAVDVA

SEQ ID NO: 95543 - protein, 9 aa, synthetic construct
  source 1..9: note = Seed: VVVGAGDVG (KRAS G13D)
WVVKAVDVH

SEQ ID NO: 95544 - protein, 9 aa, synthetic construct
  source 1..9: note = Seed: VVVGAGDVG (KRAS G13D)
WVVKAVDVM

SEQ ID NO: 95545 - protein, 9 aa, synthetic construct
  source 1..9: note = Seed: VVVGAGDVG (KRAS G13D)
WVVKAVDVN

SEQ ID NO: 95546 - protein, 9 aa, synthetic construct
  source 1..9: note = Seed: VVVGAGDVG (KRAS G13D)
WVVKAVDVQ

SEQ ID NO: 95547 - protein, 9 aa, synthetic construct
  source 1..9: note = Seed: VVVGAGDVG (KRAS G13D)
WVVKAVDVS

SEQ ID NO: 95548 - protein, 9 aa, synthetic construct
  source 1..9: note = Seed: VVVGAGDVG (KRAS G13D)
WVVKAVDVV

SEQ ID NO: 95549 - protein, 9 aa, synthetic construct
  source 1..9: note = Seed: VVVGAGDVG (KRAS G13D)
WVVLAADVA

SEQ ID NO: 95550 - protein, 9 aa, synthetic construct
  source 1..9: note = Seed: VVVGAGDVG (KRAS G13D)
WVVLAADVD

SEQ ID NO: 95551 - protein, 9 aa, synthetic construct
  source 1..9: note = Seed: VVVGAGDVG (KRAS G13D)
WVVLAADVE

SEQ ID NO: 95552 - protein, 9 aa, synthetic construct
  source 1..9: note = Seed: VVVGAGDVG (KRAS G13D)
WVVLAADVF

SEQ ID NO: 95553 - protein, 9 aa, synthetic construct
  source 1..9: note = Seed: VVVGAGDVG (KRAS G13D)
WVVLAADVG

SEQ ID NO: 95554 - protein, 9 aa, synthetic construct
  source 1..9: note = Seed: VVVGAGDVG (KRAS G13D)
WVVLAADVH

SEQ ID NO: 95555 - protein, 9 aa, synthetic construct
  source 1..9: note = Seed: VVVGAGDVG (KRAS G13D)
WVVLAADVI

SEQ ID NO: 95556 - protein, 9 aa, synthetic construct
  source 1..9: note = Seed: VVVGAGDVG (KRAS G13D)
WVVLAADVK

SEQ ID NO: 95557 - protein, 9 aa, synthetic construct
  source 1..9: note = Seed: VVVGAGDVG (KRAS G13D)
WVVLAADVL

SEQ ID NO: 95558 - protein, 9 aa, synthetic construct
  source 1..9: note = Seed: VVVGAGDVG (KRAS G13D)
WVVLAADVM

SEQ ID NO: 95559 - protein, 9 aa, synthetic construct
  source 1..9: note = Seed: VVVGAGDVG (KRAS G13D)
WVVLAADVN

SEQ ID NO: 95560 - protein, 9 aa, synthetic construct
  source 1..9: note = Seed: VVVGAGDVG (KRAS G13D)
WVVLAADVP

SEQ ID NO: 95561 - protein, 9 aa, synthetic construct
  source 1..9: note = Seed: VVVGAGDVG (KRAS G13D)
WVVLAADVQ

SEQ ID NO: 95562 - protein, 9 aa, synthetic construct
  source 1..9: note = Seed: VVVGAGDVG (KRAS G13D)
WVVLAADVR

SEQ ID NO: 95563 - protein, 9 aa, synthetic construct
  source 1..9: note = Seed: VVVGAGDVG (KRAS G13D)
WVVLAADVS

SEQ ID NO: 95564 - protein, 9 aa, synthetic construct
  source 1..9: note = Seed: VVVGAGDVG (KRAS G13D)
WVVLAADVT

SEQ ID NO: 95565 - protein, 9 aa, synthetic construct
  source 1..9: note = Seed: VVVGAGDVG (KRAS G13D)
WVVLAADVV

SEQ ID NO: 95566 - protein, 9 aa, synthetic construct
  source 1..9: note = Seed: VVVGAGDVG (KRAS G13D)
WVVLAADVY

SEQ ID NO: 95567 - protein, 9 aa, synthetic construct
  source 1..9: note = Seed: VVVGAGDVG (KRAS G13D)
WVVLADDVA

SEQ ID NO: 95568 - protein, 9 aa, synthetic construct
  source 1..9: note = Seed: VVVGAGDVG (KRAS G13D)
WVVLAEDVA

SEQ ID NO: 95569 - protein, 9 aa, synthetic construct
  source 1..9: note = Seed: VVVGAGDVG (KRAS G13D)
WVVLAEDVN

SEQ ID NO: 95570 - protein, 9 aa, synthetic construct
  source 1..9: note = Seed: VVVGAGDVG (KRAS G13D)
WVVLAGDVA

SEQ ID NO: 95571 - protein, 9 aa, synthetic construct
  source 1..9: note = Seed: VVVGAGDVG (KRAS G13D)
WVVLAGDVG

SEQ ID NO: 95572 - protein, 9 aa, synthetic construct
  source 1..9: note = Seed: VVVGAGDVG (KRAS G13D)
WVVLAGDVH

SEQ ID NO: 95573 - protein, 9 aa, synthetic construct
  source 1..9: note = Seed: VVVGAGDVG (KRAS G13D)
WVVLAGDVI

SEQ ID NO: 95574 - protein, 9 aa, synthetic construct
  source 1..9: note = Seed: VVVGAGDVG (KRAS G13D)
WVVLAGDVL

SEQ ID NO: 95575 - protein, 9 aa, synthetic construct
  source 1..9: note = Seed: VVVGAGDVG (KRAS G13D)
WVVLAGDVM

SEQ ID NO: 95576 - protein, 9 aa, synthetic construct
  source 1..9: note = Seed: VVVGAGDVG (KRAS G13D)
WVVLAGDVN

SEQ ID NO: 95577 - protein, 9 aa, synthetic construct
  source 1..9: note = Seed: VVVGAGDVG (KRAS G13D)
WVVLAGDVQ

SEQ ID NO: 95578 - protein, 9 aa, synthetic construct
  source 1..9: note = Seed: VVVGAGDVG (KRAS G13D)
WVVLAGDVS

SEQ ID NO: 95579 - protein, 9 aa, synthetic construct
  source 1..9: note = Seed: VVVGAGDVG (KRAS G13D)
WVVLAGDVT

SEQ ID NO: 95580 - protein, 9 aa, synthetic construct
  source 1..9: note = Seed: VVVGAGDVG (KRAS G13D)
WVVLAGDVV

SEQ ID NO: 95581 - protein, 9 aa, synthetic construct
  source 1..9: note = Seed: VVVGAGDVG (KRAS G13D)
WVVLAHDVA

SEQ ID NO: 95582 - protein, 9 aa, synthetic construct
  source 1..9: note = Seed: VVVGAGDVG (KRAS G13D)
WVVLAHDVH

SEQ ID NO: 95583 - protein, 9 aa, synthetic construct
  source 1..9: note = Seed: VVVGAGDVG (KRAS G13D)
WVVLAHDVL

SEQ ID NO: 95584 - protein, 9 aa, synthetic construct
  source 1..9: note = Seed: VVVGAGDVG (KRAS G13D)
WVVLAHDVM

SEQ ID NO: 95585 - protein, 9 aa, synthetic construct
  source 1..9: note = Seed: VVVGAGDVG (KRAS G13D)
WVVLAHDVN

SEQ ID NO: 95586 - protein, 9 aa, synthetic construct
  source 1..9: note = Seed: VVVGAGDVG (KRAS G13D)
WVVLAHDVQ

SEQ ID NO: 95587 - protein, 9 aa, synthetic construct
  source 1..9: note = Seed: VVVGAGDVG (KRAS G13D)
WVVLAHDVS

SEQ ID NO: 95588 - protein, 9 aa, synthetic construct
  source 1..9: note = Seed: VVVGAGDVG (KRAS G13D)
WVVLAHDVT

SEQ ID NO: 95589 - protein, 9 aa, synthetic construct
  source 1..9: note = Seed: VVVGAGDVG (KRAS G13D)
WVVLAHDVV

SEQ ID NO: 95590 - protein, 9 aa, synthetic construct
  source 1..9: note = Seed: VVVGAGDVG (KRAS G13D)
WVVLAIDVA

SEQ ID NO: 95591 - protein, 9 aa, synthetic construct
  source 1..9: note = Seed: VVVGAGDVG (KRAS G13D)
WVVLAIDVD

SEQ ID NO: 95592 - protein, 9 aa, synthetic construct
  source 1..9: note = Seed: VVVGAGDVG (KRAS G13D)
WVVLAIDVE

SEQ ID NO: 95593 - protein, 9 aa, synthetic construct
  source 1..9: note = Seed: VVVGAGDVG (KRAS G13D)
WVVLAIDVG

SEQ ID NO: 95594 - protein, 9 aa, synthetic construct
  source 1..9: note = Seed: VVVGAGDVG (KRAS G13D)
WVVLAIDVH

SEQ ID NO: 95595 - protein, 9 aa, synthetic construct
  source 1..9: note = Seed: VVVGAGDVG (KRAS G13D)
WVVLAIDVK

SEQ ID NO: 95596 - protein, 9 aa, synthetic construct
  source 1..9: note = Seed: VVVGAGDVG (KRAS G13D)
WVVLAIDVL

SEQ ID NO: 95597 - protein, 9 aa, synthetic construct
  source 1..9: note = Seed: VVVGAGDVG (KRAS G13D)
WVVLAIDVM

SEQ ID NO: 95598 - protein, 9 aa, synthetic construct
  source 1..9: note = Seed: VVVGAGDVG (KRAS G13D)
WVVLAIDVN

SEQ ID NO: 95599 - protein, 9 aa, synthetic construct
  source 1..9: note = Seed: VVVGAGDVG (KRAS G13D)
WVVLAIDVQ

SEQ ID NO: 95600 - protein, 9 aa, synthetic construct
  source 1..9: note = Seed: VVVGAGDVG (KRAS G13D)
WVVLAIDVR

SEQ ID NO: 95601 - protein, 9 aa, synthetic construct
  source 1..9: note = Seed: VVVGAGDVG (KRAS G13D)
WVVLAIDVS

SEQ ID NO: 95602 - protein, 9 aa, synthetic construct
  source 1..9: note = Seed: VVVGAGDVG (KRAS G13D)
WVVLAIDVT

SEQ ID NO: 95603 - protein, 9 aa, synthetic construct
  source 1..9: note = Seed: VVVGAGDVG (KRAS G13D)
WVVLALDVG

SEQ ID NO: 95604 - protein, 9 aa, synthetic construct
  source 1..9: note = Seed: VVVGAGDVG (KRAS G13D)
WVVLALDVS

SEQ ID NO: 95605 - protein, 9 aa, synthetic construct
  source 1..9: note = Seed: VVVGAGDVG (KRAS G13D)
WVVLAMDVG

SEQ ID NO: 95606 - protein, 9 aa, synthetic construct
  source 1..9: note = Seed: VVVGAGDVG (KRAS G13D)
WVVLAMDVL

SEQ ID NO: 95607 - protein, 9 aa, synthetic construct
  source 1..9: note = Seed: VVVGAGDVG (KRAS G13D)
WVVLAMDVM

SEQ ID NO: 95608 - protein, 9 aa, synthetic construct
  source 1..9: note = Seed: VVVGAGDVG (KRAS G13D)
WVVLAMDVS

SEQ ID NO: 95609 - protein, 9 aa, synthetic construct
  source 1..9: note = Seed: VVVGAGDVG (KRAS G13D)
WVVLANDVA

SEQ ID NO: 95610 - protein, 9 aa, synthetic construct
  source 1..9: note = Seed: VVVGAGDVG (KRAS G13D)
WVVLANDVD

SEQ ID NO: 95611 - protein, 9 aa, synthetic construct
  source 1..9: note = Seed: VVVGAGDVG (KRAS G13D)
WVVLANDVE

SEQ ID NO: 95612 - protein, 9 aa, synthetic construct
  source 1..9: note = Seed: VVVGAGDVG (KRAS G13D)
WVVLANDVF

SEQ ID NO: 95613 - protein, 9 aa, synthetic construct
  source 1..9: note = Seed: VVVGAGDVG (KRAS G13D)
WVVLANDVG

SEQ ID NO: 95614 - protein, 9 aa, synthetic construct
  source 1..9: note = Seed: VVVGAGDVG (KRAS G13D)
WVVLANDVH

SEQ ID NO: 95615 - protein, 9 aa, synthetic construct
  source 1..9: note = Seed: VVVGAGDVG (KRAS G13D)
WVVLANDVI

SEQ ID NO: 95616 - protein, 9 aa, synthetic construct
  source 1..9: note = Seed: VVVGAGDVG (KRAS G13D)
WVVLANDVK

SEQ ID NO: 95617 - protein, 9 aa, synthetic construct
  source 1..9: note = Seed: VVVGAGDVG (KRAS G13D)
WVVLANDVL

SEQ ID NO: 95618 - protein, 9 aa, synthetic construct
  source 1..9: note = Seed: VVVGAGDVG (KRAS G13D)
WVVLANDVM

SEQ ID NO: 95619 - protein, 9 aa, synthetic construct
  source 1..9: note = Seed: VVVGAGDVG (KRAS G13D)
WVVLANDVN

SEQ ID NO: 95620 - protein, 9 aa, synthetic construct
  source 1..9: note = Seed: VVVGAGDVG (KRAS G13D)
WVVLANDVP

SEQ ID NO: 95621 - protein, 9 aa, synthetic construct
  source 1..9: note = Seed: VVVGAGDVG (KRAS G13D)
WVVLANDVQ

SEQ ID NO: 95622 - protein, 9 aa, synthetic construct
  source 1..9: note = Seed: VVVGAGDVG (KRAS G13D)
WVVLANDVR

SEQ ID NO: 95623 - protein, 9 aa, synthetic construct
  source 1..9: note = Seed: VVVGAGDVG (KRAS G13D)
WVVLANDVS

SEQ ID NO: 95624 - protein, 9 aa, synthetic construct
  source 1..9: note = Seed: VVVGAGDVG (KRAS G13D)
WVVLANDVT

SEQ ID NO: 95625 - protein, 9 aa, synthetic construct
  source 1..9: note = Seed: VVVGAGDVG (KRAS G13D)
WVVLANDVV

SEQ ID NO: 95626 - protein, 9 aa, synthetic construct
  source 1..9: note = Seed: VVVGAGDVG (KRAS G13D)
WVVLANDVY

SEQ ID NO: 95627 - protein, 9 aa, synthetic construct
  source 1..9: note = Seed: VVVGAGDVG (KRAS G13D)
WVVLAPDVA

SEQ ID NO: 95628 - protein, 9 aa, synthetic construct
  source 1..9: note = Seed: VVVGAGDVG (KRAS G13D)
WVVLAPDVC

SEQ ID NO: 95629 - protein, 9 aa, synthetic construct
  source 1..9: note = Seed: VVVGAGDVG (KRAS G13D)
WVVLAPDVD

SEQ ID NO: 95630 - protein, 9 aa, synthetic construct
  source 1..9: note = Seed: VVVGAGDVG (KRAS G13D)
WVVLAPDVE

SEQ ID NO: 95631 - protein, 9 aa, synthetic construct
  source 1..9: note = Seed: VVVGAGDVG (KRAS G13D)
WVVLAPDVF

SEQ ID NO: 95632 - protein, 9 aa, synthetic construct
  source 1..9: note = Seed: VVVGAGDVG (KRAS G13D)
WVVLAPDVG

SEQ ID NO: 95633 - protein, 9 aa, synthetic construct
  source 1..9: note = Seed: VVVGAGDVG (KRAS G13D)
WVVLAPDVH

SEQ ID NO: 95634 - protein, 9 aa, synthetic construct
  source 1..9: note = Seed: VVVGAGDVG (KRAS G13D)
WVVLAPDVI

SEQ ID NO: 95635 - protein, 9 aa, synthetic construct
  source 1..9: note = Seed: VVVGAGDVG (KRAS G13D)
WVVLAPDVK

SEQ ID NO: 95636 - protein, 9 aa, synthetic construct
  source 1..9: note = Seed: VVVGAGDVG (KRAS G13D)
WVVLAPDVL

SEQ ID NO: 95637 - protein, 9 aa, synthetic construct
  source 1..9: note = Seed: VVVGAGDVG (KRAS G13D)
WVVLAPDVM

SEQ ID NO: 95638 - protein, 9 aa, synthetic construct
  source 1..9: note = Seed: VVVGAGDVG (KRAS G13D)
WVVLAPDVN

SEQ ID NO: 95639 - protein, 9 aa, synthetic construct
  source 1..9: note = Seed: VVVGAGDVG (KRAS G13D)
WVVLAPDVP

SEQ ID NO: 95640 - protein, 9 aa, synthetic construct
  source 1..9: note = Seed: VVVGAGDVG (KRAS G13D)
WVVLAPDVQ

SEQ ID NO: 95641 - protein, 9 aa, synthetic construct
  source 1..9: note = Seed: VVVGAGDVG (KRAS G13D)
WVVLAPDVR

SEQ ID NO: 95642 - protein, 9 aa, synthetic construct
  source 1..9: note = Seed: VVVGAGDVG (KRAS G13D)
WVVLAPDVS

SEQ ID NO: 95643 - protein, 9 aa, synthetic construct
  source 1..9: note = Seed: VVVGAGDVG (KRAS G13D)
WVVLAPDVT

SEQ ID NO: 95644 - protein, 9 aa, synthetic construct
  source 1..9: note = Seed: VVVGAGDVG (KRAS G13D)
WVVLAPDVV

SEQ ID NO: 95645 - protein, 9 aa, synthetic construct
  source 1..9: note = Seed: VVVGAGDVG (KRAS G13D)
WVVLAPDVY

SEQ ID NO: 95646 - protein, 9 aa, synthetic construct
  source 1..9: note = Seed: VVVGAGDVG (KRAS G13D)
WVVLAQDVA

SEQ ID NO: 95647 - protein, 9 aa, synthetic construct
  source 1..9: note = Seed: VVVGAGDVG (KRAS G13D)
WVVLAQDVH

SEQ ID NO: 95648 - protein, 9 aa, synthetic construct
  source 1..9: note = Seed: VVVGAGDVG (KRAS G13D)
WVVLAQDVN

SEQ ID NO: 95649 - protein, 9 aa, synthetic construct
  source 1..9: note = Seed: VVVGAGDVG (KRAS G13D)
WVVLAQDVS

SEQ ID NO: 95650 - protein, 9 aa, synthetic construct
  source 1..9: note = Seed: VVVGAGDVG (KRAS G13D)
WVVLAQDVV

SEQ ID NO: 95651 - protein, 9 aa, synthetic construct
  source 1..9: note = Seed: VVVGAGDVG (KRAS G13D)
WVVLASDVA

SEQ ID NO: 95652 - protein, 9 aa, synthetic construct
  source 1..9: note = Seed: VVVGAGDVG (KRAS G13D)
WVVLASDVD

SEQ ID NO: 95653 - protein, 9 aa, synthetic construct
  source 1..9: note = Seed: VVVGAGDVG (KRAS G13D)
WVVLASDVE

SEQ ID NO: 95654 - protein, 9 aa, synthetic construct
  source 1..9: note = Seed: VVVGAGDVG (KRAS G13D)
WVVLASDVG

SEQ ID NO: 95655 - protein, 9 aa, synthetic construct
  source 1..9: note = Seed: VVVGAGDVG (KRAS G13D)
WVVLASDVH

SEQ ID NO: 95656 - protein, 9 aa, synthetic construct
  source 1..9: note = Seed: VVVGAGDVG (KRAS G13D)
WVVLASDVI

SEQ ID NO: 95657 - protein, 9 aa, synthetic construct
  source 1..9: note = Seed: VVVGAGDVG (KRAS G13D)
WVVLASDVK

SEQ ID NO: 95658 - protein, 9 aa, synthetic construct
  source 1..9: note = Seed: VVVGAGDVG (KRAS G13D)
WVVLASDVL

SEQ ID NO: 95659 - protein, 9 aa, synthetic construct
  source 1..9: note = Seed: VVVGAGDVG (KRAS G13D)
WVVLASDVM

SEQ ID NO: 95660 - protein, 9 aa, synthetic construct
  source 1..9: note = Seed: VVVGAGDVG (KRAS G13D)
WVVLASDVN

SEQ ID NO: 95661 - protein, 9 aa, synthetic construct
  source 1..9: note = Seed: VVVGAGDVG (KRAS G13D)
WVVLASDVP

SEQ ID NO: 95662 - protein, 9 aa, synthetic construct
  source 1..9: note = Seed: VVVGAGDVG (KRAS G13D)
WVVLASDVQ

SEQ ID NO: 95663 - protein, 9 aa, synthetic construct
  source 1..9: note = Seed: VVVGAGDVG (KRAS G13D)
WVVLASDVR

SEQ ID NO: 95664 - protein, 9 aa, synthetic construct
  source 1..9: note = Seed: VVVGAGDVG (KRAS G13D)
WVVLASDVS

SEQ ID NO: 95665 - protein, 9 aa, synthetic construct
  source 1..9: note = Seed: VVVGAGDVG (KRAS G13D)
WVVLASDVT

SEQ ID NO: 95666 - protein, 9 aa, synthetic construct
  source 1..9: note = Seed: VVVGAGDVG (KRAS G13D)
WVVLASDVV

SEQ ID NO: 95667 - protein, 9 aa, synthetic construct
  source 1..9: note = Seed: VVVGAGDVG (KRAS G13D)
WVVLASDVY

SEQ ID NO: 95668 - protein, 9 aa, synthetic construct
  source 1..9: note = Seed: VVVGAGDVG (KRAS G13D)
WVVLATDVA

SEQ ID NO: 95669 - protein, 9 aa, synthetic construct
  source 1..9: note = Seed: VVVGAGDVG (KRAS G13D)
WVVLATDVD

SEQ ID NO: 95670 - protein, 9 aa, synthetic construct
  source 1..9: note = Seed: VVVGAGDVG (KRAS G13D)
WVVLATDVE

SEQ ID NO: 95671 - protein, 9 aa, synthetic construct
  source 1..9: note = Seed: VVVGAGDVG (KRAS G13D)
WVVLATDVG

SEQ ID NO: 95672 - protein, 9 aa, synthetic construct
  source 1..9: note = Seed: VVVGAGDVG (KRAS G13D)
WVVLATDVH

SEQ ID NO: 95673 - protein, 9 aa, synthetic construct
  source 1..9: note = Seed: VVVGAGDVG (KRAS G13D)
WVVLATDVI

SEQ ID NO: 95674 - protein, 9 aa, synthetic construct
  source 1..9: note = Seed: VVVGAGDVG (KRAS G13D)
WVVLATDVK

SEQ ID NO: 95675 - protein, 9 aa, synthetic construct
  source 1..9: note = Seed: VVVGAGDVG (KRAS G13D)
WVVLATDVL

SEQ ID NO: 95676 - protein, 9 aa, synthetic construct
  source 1..9: note = Seed: VVVGAGDVG (KRAS G13D)
WVVLATDVM

SEQ ID NO: 95677 - protein, 9 aa, synthetic construct
  source 1..9: note = Seed: VVVGAGDVG (KRAS G13D)
WVVLATDVN

SEQ ID NO: 95678 - protein, 9 aa, synthetic construct
  source 1..9: note = Seed: VVVGAGDVG (KRAS G13D)
WVVLATDVP

SEQ ID NO: 95679 - protein, 9 aa, synthetic construct
  source 1..9: note = Seed: VVVGAGDVG (KRAS G13D)
WVVLATDVQ

SEQ ID NO: 95680 - protein, 9 aa, synthetic construct
  source 1..9: note = Seed: VVVGAGDVG (KRAS G13D)
WVVLATDVR

SEQ ID NO: 95681 - protein, 9 aa, synthetic construct
  source 1..9: note = Seed: VVVGAGDVG (KRAS G13D)
WVVLATDVS

SEQ ID NO: 95682 - protein, 9 aa, synthetic construct
  source 1..9: note = Seed: VVVGAGDVG (KRAS G13D)
WVVLATDVT

SEQ ID NO: 95683 - protein, 9 aa, synthetic construct
  source 1..9: note = Seed: VVVGAGDVG (KRAS G13D)
WVVLATDVV

SEQ ID NO: 95684 - protein, 9 aa, synthetic construct
  source 1..9: note = Seed: VVVGAGDVG (KRAS G13D)
WVVLATDVY

SEQ ID NO: 95685 - protein, 9 aa, synthetic construct
  source 1..9: note = Seed: VVVGAGDVG (KRAS G13D)
WVVLAVDVA

SEQ ID NO: 95686 - protein, 9 aa, synthetic construct
  source 1..9: note = Seed: VVVGAGDVG (KRAS G13D)
WVVLAVDVD

SEQ ID NO: 95687 - protein, 9 aa, synthetic construct
  source 1..9: note = Seed: VVVGAGDVG (KRAS G13D)
WVVLAVDVE

SEQ ID NO: 95688 - protein, 9 aa, synthetic construct
  source 1..9: note = Seed: VVVGAGDVG (KRAS G13D)
WVVLAVDVH

SEQ ID NO: 95689 - protein, 9 aa, synthetic construct
  source 1..9: note = Seed: VVVGAGDVG (KRAS G13D)
WVVLAVDVK

SEQ ID NO: 95690 - protein, 9 aa, synthetic construct
  source 1..9: note = Seed: VVVGAGDVG (KRAS G13D)
WVVLAVDVN

SEQ ID NO: 95691 - protein, 9 aa, synthetic construct
  source 1..9: note = Seed: VVVGAGDVG (KRAS G13D)
WVVLAVDVP

SEQ ID NO: 95692 - protein, 9 aa, synthetic construct
  source 1..9: note = Seed: VVVGAGDVG (KRAS G13D)
WVVLAVDVQ

SEQ ID NO: 95693 - protein, 9 aa, synthetic construct
  source 1..9: note = Seed: VVVGAGDVG (KRAS G13D)
WVVLAVDVR

SEQ ID NO: 95694 - protein, 9 aa, synthetic construct
  source 1..9: note = Seed: VVVGAGDVG (KRAS G13D)
WVVLAVDVS

SEQ ID NO: 95695 - protein, 9 aa, synthetic construct
  source 1..9: note = Seed: VVVGAGDVG (KRAS G13D)
WVVLAVDVT

SEQ ID NO: 95696 - protein, 9 aa, synthetic construct
  source 1..9: note = Seed: VVVGAGDVG (KRAS G13D)
WVVMAADVA

SEQ ID NO: 95697 - protein, 9 aa, synthetic construct
  source 1..9: note = Seed: VVVGAGDVG (KRAS G13D)
WVVMAADVC

SEQ ID NO: 95698 - protein, 9 aa, synthetic construct
  source 1..9: note = Seed: VVVGAGDVG (KRAS G13D)
WVVMAADVD

SEQ ID NO: 95699 - protein, 9 aa, synthetic construct
  source 1..9: note = Seed: VVVGAGDVG (KRAS G13D)
WVVMAADVE

SEQ ID NO: 95700 - protein, 9 aa, synthetic construct
  source 1..9: note = Seed: VVVGAGDVG (KRAS G13D)
WVVMAADVF

SEQ ID NO: 95701 - protein, 9 aa, synthetic construct
  source 1..9: note = Seed: VVVGAGDVG (KRAS G13D)
WVVMAADVG

SEQ ID NO: 95702 - protein, 9 aa, synthetic construct
  source 1..9: note = Seed: VVVGAGDVG (KRAS G13D)
WVVMAADVH

SEQ ID NO: 95703 - protein, 9 aa, synthetic construct
  source 1..9: note = Seed: VVVGAGDVG (KRAS G13D)
WVVMAADVI

SEQ ID NO: 95704 - protein, 9 aa, synthetic construct
  source 1..9: note = Seed: VVVGAGDVG (KRAS G13D)
WVVMAADVK

SEQ ID NO: 95705 - protein, 9 aa, synthetic construct
  source 1..9: note = Seed: VVVGAGDVG (KRAS G13D)
WVVMAADVL

SEQ ID NO: 95706 - protein, 9 aa, synthetic construct
  source 1..9: note = Seed: VVVGAGDVG (KRAS G13D)
WVVMAADVM

SEQ ID NO: 95707 - protein, 9 aa, synthetic construct
  source 1..9: note = Seed: VVVGAGDVG (KRAS G13D)
WVVMAADVN

SEQ ID NO: 95708 - protein, 9 aa, synthetic construct
  source 1..9: note = Seed: VVVGAGDVG (KRAS G13D)
WVVMAADVP

SEQ ID NO: 95709 - protein, 9 aa, synthetic construct
  source 1..9: note = Seed: VVVGAGDVG (KRAS G13D)
WVVMAADVQ

SEQ ID NO: 95710 - protein, 9 aa, synthetic construct
  source 1..9: note = Seed: VVVGAGDVG (KRAS G13D)
WVVMAADVR

SEQ ID NO: 95711 - protein, 9 aa, synthetic construct
  source 1..9: note = Seed: VVVGAGDVG (KRAS G13D)
WVVMAADVS

SEQ ID NO: 95712 - protein, 9 aa, synthetic construct
  source 1..9: note = Seed: VVVGAGDVG (KRAS G13D)
WVVMAADVT

SEQ ID NO: 95713 - protein, 9 aa, synthetic construct
  source 1..9: note = Seed: VVVGAGDVG (KRAS G13D)
WVVMAADVV

SEQ ID NO: 95714 - protein, 9 aa, synthetic construct
  source 1..9: note = Seed: VVVGAGDVG (KRAS G13D)
WVVMAADVY

SEQ ID NO: 95715 - protein, 9 aa, synthetic construct
  source 1..9: note = Seed: VVVGAGDVG (KRAS G13D)
WVVMADDVA

SEQ ID NO: 95716 - protein, 9 aa, synthetic construct
  source 1..9: note = Seed: VVVGAGDVG (KRAS G13D)
WVVMADDVI

SEQ ID NO: 95717 - protein, 9 aa, synthetic construct
  source 1..9: note = Seed: VVVGAGDVG (KRAS G13D)
WVVMADDVL

SEQ ID NO: 95718 - protein, 9 aa, synthetic construct
  source 1..9: note = Seed: VVVGAGDVG (KRAS G13D)
WVVMADDVM

SEQ ID NO: 95719 - protein, 9 aa, synthetic construct
  source 1..9: note = Seed: VVVGAGDVG (KRAS G13D)
WVVMADDVN

SEQ ID NO: 95720 - protein, 9 aa, synthetic construct
  source 1..9: note = Seed: VVVGAGDVG (KRAS G13D)
WVVMADDVS

SEQ ID NO: 95721 - protein, 9 aa, synthetic construct
  source 1..9: note = Seed: VVVGAGDVG (KRAS G13D)
WVVMADDVV

SEQ ID NO: 95722 - protein, 9 aa, synthetic construct
  source 1..9: note = Seed: VVVGAGDVG (KRAS G13D)
WVVMAEDVA

SEQ ID NO: 95723 - protein, 9 aa, synthetic construct
  source 1..9: note = Seed: VVVGAGDVG (KRAS G13D)
WVVMAEDVN

SEQ ID NO: 95724 - protein, 9 aa, synthetic construct
  source 1..9: note = Seed: VVVGAGDVG (KRAS G13D)
WVVMAEDVS

SEQ ID NO: 95725 - protein, 9 aa, synthetic construct
  source 1..9: note = Seed: VVVGAGDVG (KRAS G13D)
WVVMAEDVT

SEQ ID NO: 95726 - protein, 9 aa, synthetic construct
  source 1..9: note = Seed: VVVGAGDVG (KRAS G13D)
WVVMAEDVV

SEQ ID NO: 95727 - protein, 9 aa, synthetic construct
  source 1..9: note = Seed: VVVGAGDVG (KRAS G13D)
WVVMAGDVA

SEQ ID NO: 95728 - protein, 9 aa, synthetic construct
  source 1..9: note = Seed: VVVGAGDVG (KRAS G13D)
WVVMAGDVD

SEQ ID NO: 95729 - protein, 9 aa, synthetic construct
  source 1..9: note = Seed: VVVGAGDVG (KRAS G13D)
WVVMAGDVE

SEQ ID NO: 95730 - protein, 9 aa, synthetic construct
  source 1..9: note = Seed: VVVGAGDVG (KRAS G13D)
WVVMAGDVG

SEQ ID NO: 95731 - protein, 9 aa, synthetic construct
  source 1..9: note = Seed: VVVGAGDVG (KRAS G13D)
WVVMAGDVH

SEQ ID NO: 95732 - protein, 9 aa, synthetic construct
  source 1..9: note = Seed: VVVGAGDVG (KRAS G13D)
WVVMAGDVI

SEQ ID NO: 95733 - protein, 9 aa, synthetic construct
  source 1..9: note = Seed: VVVGAGDVG (KRAS G13D)
WVVMAGDVK

SEQ ID NO: 95734 - protein, 9 aa, synthetic construct
  source 1..9: note = Seed: VVVGAGDVG (KRAS G13D)
WVVMAGDVL

SEQ ID NO: 95735 - protein, 9 aa, synthetic construct
  source 1..9: note = Seed: VVVGAGDVG (KRAS G13D)
WVVMAGDVM

SEQ ID NO: 95736 - protein, 9 aa, synthetic construct
  source 1..9: note = Seed: VVVGAGDVG (KRAS G13D)
WVVMAGDVN

SEQ ID NO: 95737 - protein, 9 aa, synthetic construct
  source 1..9: note = Seed: VVVGAGDVG (KRAS G13D)
WVVMAGDVP

SEQ ID NO: 95738 - protein, 9 aa, synthetic construct
  source 1..9: note = Seed: VVVGAGDVG (KRAS G13D)
WVVMAGDVQ

SEQ ID NO: 95739 - protein, 9 aa, synthetic construct
  source 1..9: note = Seed: VVVGAGDVG (KRAS G13D)
WVVMAGDVS

SEQ ID NO: 95740 - protein, 9 aa, synthetic construct
  source 1..9: note = Seed: VVVGAGDVG (KRAS G13D)
WVVMAGDVT

SEQ ID NO: 95741 - protein, 9 aa, synthetic construct
  source 1..9: note = Seed: VVVGAGDVG (KRAS G13D)
WVVMAGDVV

SEQ ID NO: 95742 - protein, 9 aa, synthetic construct
  source 1..9: note = Seed: VVVGAGDVG (KRAS G13D)
WVVMAGDVY

SEQ ID NO: 95743 - protein, 9 aa, synthetic construct
  source 1..9: note = Seed: VVVGAGDVG (KRAS G13D)
WVVMAHDVA

SEQ ID NO: 95744 - protein, 9 aa, synthetic construct
  source 1..9: note = Seed: VVVGAGDVG (KRAS G13D)
WVVMAHDVD

SEQ ID NO: 95745 - protein, 9 aa, synthetic construct
  source 1..9: note = Seed: VVVGAGDVG (KRAS G13D)
WVVMAHDVE

SEQ ID NO: 95746 - protein, 9 aa, synthetic construct
  source 1..9: note = Seed: VVVGAGDVG (KRAS G13D)
WVVMAHDVG

SEQ ID NO: 95747 - protein, 9 aa, synthetic construct
  source 1..9: note = Seed: VVVGAGDVG (KRAS G13D)
WVVMAHDVH

SEQ ID NO: 95748 - protein, 9 aa, synthetic construct
  source 1..9: note = Seed: VVVGAGDVG (KRAS G13D)
WVVMAHDVI

SEQ ID NO: 95749 - protein, 9 aa, synthetic construct
  source 1..9: note = Seed: VVVGAGDVG (KRAS G13D)
WVVMAHDVL

SEQ ID NO: 95750 - protein, 9 aa, synthetic construct
  source 1..9: note = Seed: VVVGAGDVG (KRAS G13D)
WVVMAHDVM

SEQ ID NO: 95751 - protein, 9 aa, synthetic construct
  source 1..9: note = Seed: VVVGAGDVG (KRAS G13D)
WVVMAHDVN

SEQ ID NO: 95752 - protein, 9 aa, synthetic construct
  source 1..9: note = Seed: VVVGAGDVG (KRAS G13D)
WVVMAHDVP

SEQ ID NO: 95753 - protein, 9 aa, synthetic construct
  source 1..9: note = Seed: VVVGAGDVG (KRAS G13D)
WVVMAHDVQ

SEQ ID NO: 95754 - protein, 9 aa, synthetic construct
  source 1..9: note = Seed: VVVGAGDVG (KRAS G13D)
WVVMAHDVS

SEQ ID NO: 95755 - protein, 9 aa, synthetic construct
  source 1..9: note = Seed: VVVGAGDVG (KRAS G13D)
WVVMAHDVT

SEQ ID NO: 95756 - protein, 9 aa, synthetic construct
  source 1..9: note = Seed: VVVGAGDVG (KRAS G13D)
WVVMAHDVV

SEQ ID NO: 95757 - protein, 9 aa, synthetic construct
  source 1..9: note = Seed: VVVGAGDVG (KRAS G13D)
WVVMAHDVY

SEQ ID NO: 95758 - protein, 9 aa, synthetic construct
  source 1..9: note = Seed: VVVGAGDVG (KRAS G13D)
WVVMAIDVA

SEQ ID NO: 95759 - protein, 9 aa, synthetic construct
  source 1..9: note = Seed: VVVGAGDVG (KRAS G13D)
WVVMAIDVD

SEQ ID NO: 95760 - protein, 9 aa, synthetic construct
  source 1..9: note = Seed: VVVGAGDVG (KRAS G13D)
WVVMAIDVE

SEQ ID NO: 95761 - protein, 9 aa, synthetic construct
  source 1..9: note = Seed: VVVGAGDVG (KRAS G13D)
WVVMAIDVG

SEQ ID NO: 95762 - protein, 9 aa, synthetic construct
  source 1..9: note = Seed: VVVGAGDVG (KRAS G13D)
WVVMAIDVH

SEQ ID NO: 95763 - protein, 9 aa, synthetic construct
  source 1..9: note = Seed: VVVGAGDVG (KRAS G13D)
WVVMAIDVI

SEQ ID NO: 95764 - protein, 9 aa, synthetic construct
  source 1..9: note = Seed: VVVGAGDVG (KRAS G13D)
WVVMAIDVK

SEQ ID NO: 95765 - protein, 9 aa, synthetic construct
  source 1..9: note = Seed: VVVGAGDVG (KRAS G13D)
WVVMAIDVL

SEQ ID NO: 95766 - protein, 9 aa, synthetic construct
  source 1..9: note = Seed: VVVGAGDVG (KRAS G13D)
WVVMAIDVM

SEQ ID NO: 95767 - protein, 9 aa, synthetic construct
  source 1..9: note = Seed: VVVGAGDVG (KRAS G13D)
WVVMAIDVN

SEQ ID NO: 95768 - protein, 9 aa, synthetic construct
  source 1..9: note = Seed: VVVGAGDVG (KRAS G13D)
WVVMAIDVP

SEQ ID NO: 95769 - protein, 9 aa, synthetic construct
  source 1..9: note = Seed: VVVGAGDVG (KRAS G13D)
WVVMAIDVQ

SEQ ID NO: 95770 - protein, 9 aa, synthetic construct
  source 1..9: note = Seed: VVVGAGDVG (KRAS G13D)
WVVMAIDVR

SEQ ID NO: 95771 - protein, 9 aa, synthetic construct
  source 1..9: note = Seed: VVVGAGDVG (KRAS G13D)
WVVMAIDVS

SEQ ID NO: 95772 - protein, 9 aa, synthetic construct
  source 1..9: note = Seed: VVVGAGDVG (KRAS G13D)
WVVMAIDVT

SEQ ID NO: 95773 - protein, 9 aa, synthetic construct
  source 1..9: note = Seed: VVVGAGDVG (KRAS G13D)
WVVMAIDVV

SEQ ID NO: 95774 - protein, 9 aa, synthetic construct
  source 1..9: note = Seed: VVVGAGDVG (KRAS G13D)
WVVMAIDVY

SEQ ID NO: 95775 - protein, 9 aa, synthetic construct
  source 1..9: note = Seed: VVVGAGDVG (KRAS G13D)
WVVMALDVA

SEQ ID NO: 95776 - protein, 9 aa, synthetic construct
  source 1..9: note = Seed: VVVGAGDVG (KRAS G13D)
WVVMALDVD

SEQ ID NO: 95777 - protein, 9 aa, synthetic construct
  source 1..9: note = Seed: VVVGAGDVG (KRAS G13D)
WVVMALDVG

SEQ ID NO: 95778 - protein, 9 aa, synthetic construct
  source 1..9: note = Seed: VVVGAGDVG (KRAS G13D)
WVVMALDVM

SEQ ID NO: 95779 - protein, 9 aa, synthetic construct
  source 1..9: note = Seed: VVVGAGDVG (KRAS G13D)
WVVMALDVN

SEQ ID NO: 95780 - protein, 9 aa, synthetic construct
  source 1..9: note = Seed: VVVGAGDVG (KRAS G13D)
WVVMALDVS

SEQ ID NO: 95781 - protein, 9 aa, synthetic construct
  source 1..9: note = Seed: VVVGAGDVG (KRAS G13D)
WVVMALDVT

SEQ ID NO: 95782 - protein, 9 aa, synthetic construct
  source 1..9: note = Seed: VVVGAGDVG (KRAS G13D)
WVVMAMDVD

SEQ ID NO: 95783 - protein, 9 aa, synthetic construct
  source 1..9: note = Seed: VVVGAGDVG (KRAS G13D)
WVVMAMDVG

SEQ ID NO: 95784 - protein, 9 aa, synthetic construct
  source 1..9: note = Seed: VVVGAGDVG (KRAS G13D)
WVVMAMDVN

SEQ ID NO: 95785 - protein, 9 aa, synthetic construct
  source 1..9: note = Seed: VVVGAGDVG (KRAS G13D)
WVVMAMDVS

SEQ ID NO: 95786 - protein, 9 aa, synthetic construct
  source 1..9: note = Seed: VVVGAGDVG (KRAS G13D)
WVVMANDVA

SEQ ID NO: 95787 - protein, 9 aa, synthetic construct
  source 1..9: note = Seed: VVVGAGDVG (KRAS G13D)
WVVMANDVD

SEQ ID NO: 95788 - protein, 9 aa, synthetic construct
  source 1..9: note = Seed: VVVGAGDVG (KRAS G13D)
WVVMANDVE

SEQ ID NO: 95789 - protein, 9 aa, synthetic construct
  source 1..9: note = Seed: VVVGAGDVG (KRAS G13D)
WVVMANDVF

SEQ ID NO: 95790 - protein, 9 aa, synthetic construct
  source 1..9: note = Seed: VVVGAGDVG (KRAS G13D)
WVVMANDVG

SEQ ID NO: 95791 - protein, 9 aa, synthetic construct
  source 1..9: note = Seed: VVVGAGDVG (KRAS G13D)
WVVMANDVH

SEQ ID NO: 95792 - protein, 9 aa, synthetic construct
  source 1..9: note = Seed: VVVGAGDVG (KRAS G13D)
WVVMANDVI

SEQ ID NO: 95793 - protein, 9 aa, synthetic construct
  source 1..9: note = Seed: VVVGAGDVG (KRAS G13D)
WVVMANDVK

SEQ ID NO: 95794 - protein, 9 aa, synthetic construct
  source 1..9: note = Seed: VVVGAGDVG (KRAS G13D)
WVVMANDVL

SEQ ID NO: 95795 - protein, 9 aa, synthetic construct
  source 1..9: note = Seed: VVVGAGDVG (KRAS G13D)
WVVMANDVM

SEQ ID NO: 95796 - protein, 9 aa, synthetic construct
  source 1..9: note = Seed: VVVGAGDVG (KRAS G13D)
WVVMANDVN

SEQ ID NO: 95797 - protein, 9 aa, synthetic construct
  source 1..9: note = Seed: VVVGAGDVG (KRAS G13D)
WVVMANDVP

SEQ ID NO: 95798 - protein, 9 aa, synthetic construct
  source 1..9: note = Seed: VVVGAGDVG (KRAS G13D)
WVVMANDVQ

SEQ ID NO: 95799 - protein, 9 aa, synthetic construct
  source 1..9: note = Seed: VVVGAGDVG (KRAS G13D)
WVVMANDVR

SEQ ID NO: 95800 - protein, 9 aa, synthetic construct
  source 1..9: note = Seed: VVVGAGDVG (KRAS G13D)
WVVMANDVS

SEQ ID NO: 95801 - protein, 9 aa, synthetic construct
  source 1..9: note = Seed: VVVGAGDVG (KRAS G13D)
WVVMANDVT

SEQ ID NO: 95802 - protein, 9 aa, synthetic construct
  source 1..9: note = Seed: VVVGAGDVG (KRAS G13D)
WVVMANDVV

SEQ ID NO: 95803 - protein, 9 aa, synthetic construct
  source 1..9: note = Seed: VVVGAGDVG (KRAS G13D)
WVVMANDVY

SEQ ID NO: 95804 - protein, 9 aa, synthetic construct
  source 1..9: note = Seed: VVVGAGDVG (KRAS G13D)
WVVMAPDVA

SEQ ID NO: 95805 - protein, 9 aa, synthetic construct
  source 1..9: note = Seed: VVVGAGDVG (KRAS G13D)
WVVMAPDVC

SEQ ID NO: 95806 - protein, 9 aa, synthetic construct
  source 1..9: note = Seed: VVVGAGDVG (KRAS G13D)
WVVMAPDVD

SEQ ID NO: 95807 - protein, 9 aa, synthetic construct
  source 1..9: note = Seed: VVVGAGDVG (KRAS G13D)
WVVMAPDVE

SEQ ID NO: 95808 - protein, 9 aa, synthetic construct
  source 1..9: note = Seed: VVVGAGDVG (KRAS G13D)
WVVMAPDVF

SEQ ID NO: 95809 - protein, 9 aa, synthetic construct
  source 1..9: note = Seed: VVVGAGDVG (KRAS G13D)
WVVMAPDVG

SEQ ID NO: 95810 - protein, 9 aa, synthetic construct
  source 1..9: note = Seed: VVVGAGDVG (KRAS G13D)
WVVMAPDVH

SEQ ID NO: 95811 - protein, 9 aa, synthetic construct
  source 1..9: note = Seed: VVVGAGDVG (KRAS G13D)
WVVMAPDVI

SEQ ID NO: 95812 - protein, 9 aa, synthetic construct
  source 1..9: note = Seed: VVVGAGDVG (KRAS G13D)
WVVMAPDVK

SEQ ID NO: 95813 - protein, 9 aa, synthetic construct
  source 1..9: note = Seed: VVVGAGDVG (KRAS G13D)
WVVMAPDVL

SEQ ID NO: 95814 - protein, 9 aa, synthetic construct
  source 1..9: note = Seed: VVVGAGDVG (KRAS G13D)
WVVMAPDVM

SEQ ID NO: 95815 - protein, 9 aa, synthetic construct
  source 1..9: note = Seed: VVVGAGDVG (KRAS G13D)
WVVMAPDVN

SEQ ID NO: 95816 - protein, 9 aa, synthetic construct
  source 1..9: note = Seed: VVVGAGDVG (KRAS G13D)
WVVMAPDVP

SEQ ID NO: 95817 - protein, 9 aa, synthetic construct
  source 1..9: note = Seed: VVVGAGDVG (KRAS G13D)
WVVMAPDVQ

SEQ ID NO: 95818 - protein, 9 aa, synthetic construct
  source 1..9: note = Seed: VVVGAGDVG (KRAS G13D)
WVVMAPDVR

SEQ ID NO: 95819 - protein, 9 aa, synthetic construct
  source 1..9: note = Seed: VVVGAGDVG (KRAS G13D)
WVVMAPDVS

SEQ ID NO: 95820 - protein, 9 aa, synthetic construct
  source 1..9: note = Seed: VVVGAGDVG (KRAS G13D)
WVVMAPDVT

SEQ ID NO: 95821 - protein, 9 aa, synthetic construct
  source 1..9: note = Seed: VVVGAGDVG (KRAS G13D)
WVVMAPDVV

SEQ ID NO: 95822 - protein, 9 aa, synthetic construct
  source 1..9: note = Seed: VVVGAGDVG (KRAS G13D)
WVVMAPDVY

SEQ ID NO: 95823 - protein, 9 aa, synthetic construct
  source 1..9: note = Seed: VVVGAGDVG (KRAS G13D)
WVVMAQDVA

SEQ ID NO: 95824 - protein, 9 aa, synthetic construct
  source 1..9: note = Seed: VVVGAGDVG (KRAS G13D)
WVVMAQDVH

SEQ ID NO: 95825 - protein, 9 aa, synthetic construct
  source 1..9: note = Seed: VVVGAGDVG (KRAS G13D)
WVVMAQDVI

SEQ ID NO: 95826 - protein, 9 aa, synthetic construct
  source 1..9: note = Seed: VVVGAGDVG (KRAS G13D)
WVVMAQDVL

SEQ ID NO: 95827 - protein, 9 aa, synthetic construct
  source 1..9: note = Seed: VVVGAGDVG (KRAS G13D)
WVVMAQDVM

SEQ ID NO: 95828 - protein, 9 aa, synthetic construct
  source 1..9: note = Seed: VVVGAGDVG (KRAS G13D)
WVVMAQDVN

SEQ ID NO: 95829 - protein, 9 aa, synthetic construct
  source 1..9: note = Seed: VVVGAGDVG (KRAS G13D)
WVVMAQDVQ

SEQ ID NO: 95830 - protein, 9 aa, synthetic construct
  source 1..9: note = Seed: VVVGAGDVG (KRAS G13D)
WVVMAQDVS

SEQ ID NO: 95831 - protein, 9 aa, synthetic construct
  source 1..9: note = Seed: VVVGAGDVG (KRAS G13D)
WVVMAQDVT

SEQ ID NO: 95832 - protein, 9 aa, synthetic construct
  source 1..9: note = Seed: VVVGAGDVG (KRAS G13D)
WVVMAQDVV

SEQ ID NO: 95833 - protein, 9 aa, synthetic construct
  source 1..9: note = Seed: VVVGAGDVG (KRAS G13D)
WVVMASDVA

SEQ ID NO: 95834 - protein, 9 aa, synthetic construct
  source 1..9: note = Seed: VVVGAGDVG (KRAS G13D)
WVVMASDVD

SEQ ID NO: 95835 - protein, 9 aa, synthetic construct
  source 1..9: note = Seed: VVVGAGDVG (KRAS G13D)
WVVMASDVE

SEQ ID NO: 95836 - protein, 9 aa, synthetic construct
  source 1..9: note = Seed: VVVGAGDVG (KRAS G13D)
WVVMASDVF

SEQ ID NO: 95837 - protein, 9 aa, synthetic construct
  source 1..9: note = Seed: VVVGAGDVG (KRAS G13D)
WVVMASDVG

SEQ ID NO: 95838 - protein, 9 aa, synthetic construct
  source 1..9: note = Seed: VVVGAGDVG (KRAS G13D)
WVVMASDVH

SEQ ID NO: 95839 - protein, 9 aa, synthetic construct
  source 1..9: note = Seed: VVVGAGDVG (KRAS G13D)
WVVMASDVI

SEQ ID NO: 95840 - protein, 9 aa, synthetic construct
  source 1..9: note = Seed: VVVGAGDVG (KRAS G13D)
WVVMASDVK

SEQ ID NO: 95841 - protein, 9 aa, synthetic construct
  source 1..9: note = Seed: VVVGAGDVG (KRAS G13D)
WVVMASDVL

SEQ ID NO: 95842 - protein, 9 aa, synthetic construct
  source 1..9: note = Seed: VVVGAGDVG (KRAS G13D)
WVVMASDVM

SEQ ID NO: 95843 - protein, 9 aa, synthetic construct
  source 1..9: note = Seed: VVVGAGDVG (KRAS G13D)
WVVMASDVN

SEQ ID NO: 95844 - protein, 9 aa, synthetic construct
  source 1..9: note = Seed: VVVGAGDVG (KRAS G13D)
WVVMASDVP

SEQ ID NO: 95845 - protein, 9 aa, synthetic construct
  source 1..9: note = Seed: VVVGAGDVG (KRAS G13D)
WVVMASDVQ

SEQ ID NO: 95846 - protein, 9 aa, synthetic construct
  source 1..9: note = Seed: VVVGAGDVG (KRAS G13D)
WVVMASDVR

SEQ ID NO: 95847 - protein, 9 aa, synthetic construct
  source 1..9: note = Seed: VVVGAGDVG (KRAS G13D)
WVVMASDVS

SEQ ID NO: 95848 - protein, 9 aa, synthetic construct
  source 1..9: note = Seed: VVVGAGDVG (KRAS G13D)
WVVMASDVT

SEQ ID NO: 95849 - protein, 9 aa, synthetic construct
  source 1..9: note = Seed: VVVGAGDVG (KRAS G13D)
WVVMASDVV

SEQ ID NO: 95850 - protein, 9 aa, synthetic construct
  source 1..9: note = Seed: VVVGAGDVG (KRAS G13D)
WVVMASDVY

SEQ ID NO: 95851 - protein, 9 aa, synthetic construct
  source 1..9: note = Seed: VVVGAGDVG (KRAS G13D)
WVVMATDVA

SEQ ID NO: 95852 - protein, 9 aa, synthetic construct
  source 1..9: note = Seed: VVVGAGDVG (KRAS G13D)
WVVMATDVD

SEQ ID NO: 95853 - protein, 9 aa, synthetic construct
  source 1..9: note = Seed: VVVGAGDVG (KRAS G13D)
WVVMATDVE

SEQ ID NO: 95854 - protein, 9 aa, synthetic construct
  source 1..9: note = Seed: VVVGAGDVG (KRAS G13D)
WVVMATDVG

SEQ ID NO: 95855 - protein, 9 aa, synthetic construct
  source 1..9: note = Seed: VVVGAGDVG (KRAS G13D)
WVVMATDVH

SEQ ID NO: 95856 - protein, 9 aa, synthetic construct
  source 1..9: note = Seed: VVVGAGDVG (KRAS G13D)
WVVMATDVI

SEQ ID NO: 95857 - protein, 9 aa, synthetic construct
  source 1..9: note = Seed: VVVGAGDVG (KRAS G13D)
WVVMATDVK

SEQ ID NO: 95858 - protein, 9 aa, synthetic construct
  source 1..9: note = Seed: VVVGAGDVG (KRAS G13D)
WVVMATDVL

SEQ ID NO: 95859 - protein, 9 aa, synthetic construct
  source 1..9: note = Seed: VVVGAGDVG (KRAS G13D)
WVVMATDVM

SEQ ID NO: 95860 - protein, 9 aa, synthetic construct
  source 1..9: note = Seed: VVVGAGDVG (KRAS G13D)
WVVMATDVN

SEQ ID NO: 95861 - protein, 9 aa, synthetic construct
  source 1..9: note = Seed: VVVGAGDVG (KRAS G13D)
WVVMATDVP

SEQ ID NO: 95862 - protein, 9 aa, synthetic construct
  source 1..9: note = Seed: VVVGAGDVG (KRAS G13D)
WVVMATDVQ

SEQ ID NO: 95863 - protein, 9 aa, synthetic construct
  source 1..9: note = Seed: VVVGAGDVG (KRAS G13D)
WVVMATDVR

SEQ ID NO: 95864 - protein, 9 aa, synthetic construct
  source 1..9: note = Seed: VVVGAGDVG (KRAS G13D)
WVVMATDVS

SEQ ID NO: 95865 - protein, 9 aa, synthetic construct
  source 1..9: note = Seed: VVVGAGDVG (KRAS G13D)
WVVMATDVT

SEQ ID NO: 95866 - protein, 9 aa, synthetic construct
  source 1..9: note = Seed: VVVGAGDVG (KRAS G13D)
WVVMATDVV

SEQ ID NO: 95867 - protein, 9 aa, synthetic construct
  source 1..9: note = Seed: VVVGAGDVG (KRAS G13D)
WVVMATDVY

SEQ ID NO: 95868 - protein, 9 aa, synthetic construct
  source 1..9: note = Seed: VVVGAGDVG (KRAS G13D)
WVVMAVDVA

SEQ ID NO: 95869 - protein, 9 aa, synthetic construct
  source 1..9: note = Seed: VVVGAGDVG (KRAS G13D)
WVVMAVDVD

SEQ ID NO: 95870 - protein, 9 aa, synthetic construct
  source 1..9: note = Seed: VVVGAGDVG (KRAS G13D)
WVVMAVDVE

SEQ ID NO: 95871 - protein, 9 aa, synthetic construct
  source 1..9: note = Seed: VVVGAGDVG (KRAS G13D)
WVVMAVDVG

SEQ ID NO: 95872 - protein, 9 aa, synthetic construct
  source 1..9: note = Seed: VVVGAGDVG (KRAS G13D)
WVVMAVDVH

SEQ ID NO: 95873 - protein, 9 aa, synthetic construct
  source 1..9: note = Seed: VVVGAGDVG (KRAS G13D)
WVVMAVDVI

SEQ ID NO: 95874 - protein, 9 aa, synthetic construct
  source 1..9: note = Seed: VVVGAGDVG (KRAS G13D)
WVVMAVDVK

SEQ ID NO: 95875 - protein, 9 aa, synthetic construct
  source 1..9: note = Seed: VVVGAGDVG (KRAS G13D)
WVVMAVDVL

SEQ ID NO: 95876 - protein, 9 aa, synthetic construct
  source 1..9: note = Seed: VVVGAGDVG (KRAS G13D)
WVVMAVDVM

SEQ ID NO: 95877 - protein, 9 aa, synthetic construct
  source 1..9: note = Seed: VVVGAGDVG (KRAS G13D)
WVVMAVDVN

SEQ ID NO: 95878 - protein, 9 aa, synthetic construct
  source 1..9: note = Seed: VVVGAGDVG (KRAS G13D)
WVVMAVDVP

SEQ ID NO: 95879 - protein, 9 aa, synthetic construct
  source 1..9: note = Seed: VVVGAGDVG (KRAS G13D)
WVVMAVDVQ

SEQ ID NO: 95880 - protein, 9 aa, synthetic construct
  source 1..9: note = Seed: VVVGAGDVG (KRAS G13D)
WVVMAVDVR

SEQ ID NO: 95881 - protein, 9 aa, synthetic construct
  source 1..9: note = Seed: VVVGAGDVG (KRAS G13D)
WVVMAVDVS

SEQ ID NO: 95882 - protein, 9 aa, synthetic construct
  source 1..9: note = Seed: VVVGAGDVG (KRAS G13D)
WVVMAVDVT

SEQ ID NO: 95883 - protein, 9 aa, synthetic construct
  source 1..9: note = Seed: VVVGAGDVG (KRAS G13D)
WVVMAVDVV

SEQ ID NO: 95884 - protein, 9 aa, synthetic construct
  source 1..9: note = Seed: VVVGAGDVG (KRAS G13D)
WVVMAYDVA

SEQ ID NO: 95885 - protein, 9 aa, synthetic construct
  source 1..9: note = Seed: VVVGAGDVG (KRAS G13D)
WVVNAADVA

SEQ ID NO: 95886 - protein, 9 aa, synthetic construct
  source 1..9: note = Seed: VVVGAGDVG (KRAS G13D)
WVVNAADVF

SEQ ID NO: 95887 - protein, 9 aa, synthetic construct
  source 1..9: note = Seed: VVVGAGDVG (KRAS G13D)
WVVNAADVH

SEQ ID NO: 95888 - protein, 9 aa, synthetic construct
  source 1..9: note = Seed: VVVGAGDVG (KRAS G13D)
WVVNAADVI

SEQ ID NO: 95889 - protein, 9 aa, synthetic construct
  source 1..9: note = Seed: VVVGAGDVG (KRAS G13D)
WVVNAADVL

SEQ ID NO: 95890 - protein, 9 aa, synthetic construct
  source 1..9: note = Seed: VVVGAGDVG (KRAS G13D)
WVVNAADVM

SEQ ID NO: 95891 - protein, 9 aa, synthetic construct
  source 1..9: note = Seed: VVVGAGDVG (KRAS G13D)
WVVNAADVN

SEQ ID NO: 95892 - protein, 9 aa, synthetic construct
  source 1..9: note = Seed: VVVGAGDVG (KRAS G13D)
WVVNAADVQ

SEQ ID NO: 95893 - protein, 9 aa, synthetic construct
  source 1..9: note = Seed: VVVGAGDVG (KRAS G13D)
WVVNAADVS

SEQ ID NO: 95894 - protein, 9 aa, synthetic construct
  source 1..9: note = Seed: VVVGAGDVG (KRAS G13D)
WVVNAADVT

SEQ ID NO: 95895 - protein, 9 aa, synthetic construct
  source 1..9: note = Seed: VVVGAGDVG (KRAS G13D)
WVVNAADVV

SEQ ID NO: 95896 - protein, 9 aa, synthetic construct
  source 1..9: note = Seed: VVVGAGDVG (KRAS G13D)
WVVNAADVW

SEQ ID NO: 95897 - protein, 9 aa, synthetic construct
  source 1..9: note = Seed: VVVGAGDVG (KRAS G13D)
WVVNAADVY

SEQ ID NO: 95898 - protein, 9 aa, synthetic construct
  source 1..9: note = Seed: VVVGAGDVG (KRAS G13D)
WVVNAIDVA

SEQ ID NO: 95899 - protein, 9 aa, synthetic construct
  source 1..9: note = Seed: VVVGAGDVG (KRAS G13D)
WVVNAIDVL

SEQ ID NO: 95900 - protein, 9 aa, synthetic construct
  source 1..9: note = Seed: VVVGAGDVG (KRAS G13D)
WVVNAIDVM

SEQ ID NO: 95901 - protein, 9 aa, synthetic construct
  source 1..9: note = Seed: VVVGAGDVG (KRAS G13D)
WVVNAIDVN

SEQ ID NO: 95902 - protein, 9 aa, synthetic construct
  source 1..9: note = Seed: VVVGAGDVG (KRAS G13D)
WVVNAIDVQ

SEQ ID NO: 95903 - protein, 9 aa, synthetic construct
  source 1..9: note = Seed: VVVGAGDVG (KRAS G13D)
WVVNAIDVS

SEQ ID NO: 95904 - protein, 9 aa, synthetic construct
  source 1..9: note = Seed: VVVGAGDVG (KRAS G13D)
WVVNAIDVV

SEQ ID NO: 95905 - protein, 9 aa, synthetic construct
  source 1..9: note = Seed: VVVGAGDVG (KRAS G13D)
WVVNALDVA

SEQ ID NO: 95906 - protein, 9 aa, synthetic construct
  source 1..9: note = Seed: VVVGAGDVG (KRAS G13D)
WVVNALDVF

SEQ ID NO: 95907 - protein, 9 aa, synthetic construct
  source 1..9: note = Seed: VVVGAGDVG (KRAS G13D)
WVVNALDVL

SEQ ID NO: 95908 - protein, 9 aa, synthetic construct
  source 1..9: note = Seed: VVVGAGDVG (KRAS G13D)
WVVNALDVM

SEQ ID NO: 95909 - protein, 9 aa, synthetic construct
  source 1..9: note = Seed: VVVGAGDVG (KRAS G13D)
WVVNALDVV

SEQ ID NO: 95910 - protein, 9 aa, synthetic construct
  source 1..9: note = Seed: VVVGAGDVG (KRAS G13D)
WVVNAMDVM

SEQ ID NO: 95911 - protein, 9 aa, synthetic construct
  source 1..9: note = Seed: VVVGAGDVG (KRAS G13D)
WVVNANDVA

SEQ ID NO: 95912 - protein, 9 aa, synthetic construct
  source 1..9: note = Seed: VVVGAGDVG (KRAS G13D)
WVVNANDVI

SEQ ID NO: 95913 - protein, 9 aa, synthetic construct
  source 1..9: note = Seed: VVVGAGDVG (KRAS G13D)
WVVNANDVS

SEQ ID NO: 95914 - protein, 9 aa, synthetic construct
  source 1..9: note = Seed: VVVGAGDVG (KRAS G13D)
WVVNANDVV

SEQ ID NO: 95915 - protein, 9 aa, synthetic construct
  source 1..9: note = Seed: VVVGAGDVG (KRAS G13D)
WVVNASDVA

SEQ ID NO: 95916 - protein, 9 aa, synthetic construct
  source 1..9: note = Seed: VVVGAGDVG (KRAS G13D)
WVVNASDVS

SEQ ID NO: 95917 - protein, 9 aa, synthetic construct
  source 1..9: note = Seed: VVVGAGDVG (KRAS G13D)
WVVNASDVV

SEQ ID NO: 95918 - protein, 9 aa, synthetic construct
  source 1..9: note = Seed: VVVGAGDVG (KRAS G13D)
WVVNATDVA

SEQ ID NO: 95919 - protein, 9 aa, synthetic construct
  source 1..9: note = Seed: VVVGAGDVG (KRAS G13D)
WVVNAVDVA

SEQ ID NO: 95920 - protein, 9 aa, synthetic construct
  source 1..9: note = Seed: VVVGAGDVG (KRAS G13D)
WVVNAVDVF

SEQ ID NO: 95921 - protein, 9 aa, synthetic construct
  source 1..9: note = Seed: VVVGAGDVG (KRAS G13D)
WVVNAVDVM

SEQ ID NO: 95922 - protein, 9 aa, synthetic construct
  source 1..9: note = Seed: VVVGAGDVG (KRAS G13D)
WVVNAVDVN

SEQ ID NO: 95923 - protein, 9 aa, synthetic construct
  source 1..9: note = Seed: VVVGAGDVG (KRAS G13D)
WVVNAVDVS

SEQ ID NO: 95924 - protein, 9 aa, synthetic construct
  source 1..9: note = Seed: VVVGAGDVG (KRAS G13D)
WVVNAVDVV

SEQ ID NO: 95925 - protein, 9 aa, synthetic construct
  source 1..9: note = Seed: VVVGAGDVG (KRAS G13D)
WVVNAVDVY

SEQ ID NO: 95926 - protein, 9 aa, synthetic construct
  source 1..9: note = Seed: VVVGAGDVG (KRAS G13D)
WVVPAADVA

SEQ ID NO: 95927 - protein, 9 aa, synthetic construct
  source 1..9: note = Seed: VVVGAGDVG (KRAS G13D)
WVVPASDVA

SEQ ID NO: 95928 - protein, 9 aa, synthetic construct
  source 1..9: note = Seed: VVVGAGDVG (KRAS G13D)
WVVPASDVS

SEQ ID NO: 95929 - protein, 9 aa, synthetic construct
  source 1..9: note = Seed: VVVGAGDVG (KRAS G13D)
WVVPASDVV

SEQ ID NO: 95930 - protein, 9 aa, synthetic construct
  source 1..9: note = Seed: VVVGAGDVG (KRAS G13D)
WVVPATDVA

SEQ ID NO: 95931 - protein, 9 aa, synthetic construct
  source 1..9: note = Seed: VVVGAGDVG (KRAS G13D)
WVVPATDVI

SEQ ID NO: 95932 - protein, 9 aa, synthetic construct
  source 1..9: note = Seed: VVVGAGDVG (KRAS G13D)
WVVPATDVS

SEQ ID NO: 95933 - protein, 9 aa, synthetic construct
  source 1..9: note = Seed: VVVGAGDVG (KRAS G13D)
WVVPATDVV

SEQ ID NO: 95934 - protein, 9 aa, synthetic construct
  source 1..9: note = Seed: VVVGAGDVG (KRAS G13D)
WVVQAADVA

SEQ ID NO: 95935 - protein, 9 aa, synthetic construct
  source 1..9: note = Seed: VVVGAGDVG (KRAS G13D)
WVVQAADVE

SEQ ID NO: 95936 - protein, 9 aa, synthetic construct
  source 1..9: note = Seed: VVVGAGDVG (KRAS G13D)
WVVQAADVF

SEQ ID NO: 95937 - protein, 9 aa, synthetic construct
  source 1..9: note = Seed: VVVGAGDVG (KRAS G13D)
WVVQAADVG

SEQ ID NO: 95938 - protein, 9 aa, synthetic construct
  source 1..9: note = Seed: VVVGAGDVG (KRAS G13D)
WVVQAADVH

SEQ ID NO: 95939 - protein, 9 aa, synthetic construct
  source 1..9: note = Seed: VVVGAGDVG (KRAS G13D)
WVVQAADVI

SEQ ID NO: 95940 - protein, 9 aa, synthetic construct
  source 1..9: note = Seed: VVVGAGDVG (KRAS G13D)
WVVQAADVK

SEQ ID NO: 95941 - protein, 9 aa, synthetic construct
  source 1..9: note = Seed: VVVGAGDVG (KRAS G13D)
WVVQAADVL

SEQ ID NO: 95942 - protein, 9 aa, synthetic construct
  source 1..9: note = Seed: VVVGAGDVG (KRAS G13D)
WVVQAADVM

SEQ ID NO: 95943 - protein, 9 aa, synthetic construct
  source 1..9: note = Seed: VVVGAGDVG (KRAS G13D)
WVVQAADVN

SEQ ID NO: 95944 - protein, 9 aa, synthetic construct
  source 1..9: note = Seed: VVVGAGDVG (KRAS G13D)
WVVQAADVP

SEQ ID NO: 95945 - protein, 9 aa, synthetic construct
  source 1..9: note = Seed: VVVGAGDVG (KRAS G13D)
WVVQAADVQ

SEQ ID NO: 95946 - protein, 9 aa, synthetic construct
  source 1..9: note = Seed: VVVGAGDVG (KRAS G13D)
WVVQAADVR

SEQ ID NO: 95947 - protein, 9 aa, synthetic construct
  source 1..9: note = Seed: VVVGAGDVG (KRAS G13D)
WVVQAADVS

SEQ ID NO: 95948 - protein, 9 aa, synthetic construct
  source 1..9: note = Seed: VVVGAGDVG (KRAS G13D)
WVVQAADVT

SEQ ID NO: 95949 - protein, 9 aa, synthetic construct
  source 1..9: note = Seed: VVVGAGDVG (KRAS G13D)
WVVQAADVV

SEQ ID NO: 95950 - protein, 9 aa, synthetic construct
  source 1..9: note = Seed: VVVGAGDVG (KRAS G13D)
WVVQAADVY

SEQ ID NO: 95951 - protein, 9 aa, synthetic construct
  source 1..9: note = Seed: VVVGAGDVG (KRAS G13D)
WVVQAGDVA

SEQ ID NO: 95952 - protein, 9 aa, synthetic construct
  source 1..9: note = Seed: VVVGAGDVG (KRAS G13D)
WVVQAHDVA

SEQ ID NO: 95953 - protein, 9 aa, synthetic construct
  source 1..9: note = Seed: VVVGAGDVG (KRAS G13D)
WVVQAHDVL

SEQ ID NO: 95954 - protein, 9 aa, synthetic construct
  source 1..9: note = Seed: VVVGAGDVG (KRAS G13D)
WVVQAHDVS

SEQ ID NO: 95955 - protein, 9 aa, synthetic construct
  source 1..9: note = Seed: VVVGAGDVG (KRAS G13D)
WVVQAHDVV

SEQ ID NO: 95956 - protein, 9 aa, synthetic construct
  source 1..9: note = Seed: VVVGAGDVG (KRAS G13D)
WVVQAIDVA

SEQ ID NO: 95957 - protein, 9 aa, synthetic construct
  source 1..9: note = Seed: VVVGAGDVG (KRAS G13D)
WVVQAIDVE

SEQ ID NO: 95958 - protein, 9 aa, synthetic construct
  source 1..9: note = Seed: VVVGAGDVG (KRAS G13D)
WVVQAIDVG

SEQ ID NO: 95959 - protein, 9 aa, synthetic construct
  source 1..9: note = Seed: VVVGAGDVG (KRAS G13D)
WVVQAIDVH

SEQ ID NO: 95960 - protein, 9 aa, synthetic construct
  source 1..9: note = Seed: VVVGAGDVG (KRAS G13D)
WVVQAIDVI

SEQ ID NO: 95961 - protein, 9 aa, synthetic construct
  source 1..9: note = Seed: VVVGAGDVG (KRAS G13D)
WVVQAIDVK

SEQ ID NO: 95962 - protein, 9 aa, synthetic construct
  source 1..9: note = Seed: VVVGAGDVG (KRAS G13D)
WVVQAIDVL

SEQ ID NO: 95963 - protein, 9 aa, synthetic construct
  source 1..9: note = Seed: VVVGAGDVG (KRAS G13D)
WVVQAIDVM

SEQ ID NO: 95964 - protein, 9 aa, synthetic construct
  source 1..9: note = Seed: VVVGAGDVG (KRAS G13D)
WVVQAIDVN

SEQ ID NO: 95965 - protein, 9 aa, synthetic construct
  source 1..9: note = Seed: VVVGAGDVG (KRAS G13D)
WVVQAIDVQ

SEQ ID NO: 95966 - protein, 9 aa, synthetic construct
  source 1..9: note = Seed: VVVGAGDVG (KRAS G13D)
WVVQAIDVR

SEQ ID NO: 95967 - protein, 9 aa, synthetic construct
  source 1..9: note = Seed: VVVGAGDVG (KRAS G13D)
WVVQAIDVS

SEQ ID NO: 95968 - protein, 9 aa, synthetic construct
  source 1..9: note = Seed: VVVGAGDVG (KRAS G13D)
WVVQAIDVT

SEQ ID NO: 95969 - protein, 9 aa, synthetic construct
  source 1..9: note = Seed: VVVGAGDVG (KRAS G13D)
WVVQAIDVV

SEQ ID NO: 95970 - protein, 9 aa, synthetic construct
  source 1..9: note = Seed: VVVGAGDVG (KRAS G13D)
WVVQALDVL

SEQ ID NO: 95971 - protein, 9 aa, synthetic construct
  source 1..9: note = Seed: VVVGAGDVG (KRAS G13D)
WVVQALDVM

SEQ ID NO: 95972 - protein, 9 aa, synthetic construct
  source 1..9: note = Seed: VVVGAGDVG (KRAS G13D)
WVVQALDVS

SEQ ID NO: 95973 - protein, 9 aa, synthetic construct
  source 1..9: note = Seed: VVVGAGDVG (KRAS G13D)
WVVQANDVA

SEQ ID NO: 95974 - protein, 9 aa, synthetic construct
  source 1..9: note = Seed: VVVGAGDVG (KRAS G13D)
WVVQANDVF

SEQ ID NO: 95975 - protein, 9 aa, synthetic construct
  source 1..9: note = Seed: VVVGAGDVG (KRAS G13D)
WVVQANDVG

SEQ ID NO: 95976 - protein, 9 aa, synthetic construct
  source 1..9: note = Seed: VVVGAGDVG (KRAS G13D)
WVVQANDVH

SEQ ID NO: 95977 - protein, 9 aa, synthetic construct
  source 1..9: note = Seed: VVVGAGDVG (KRAS G13D)
WVVQANDVI

SEQ ID NO: 95978 - protein, 9 aa, synthetic construct
  source 1..9: note = Seed: VVVGAGDVG (KRAS G13D)
WVVQANDVL

SEQ ID NO: 95979 - protein, 9 aa, synthetic construct
  source 1..9: note = Seed: VVVGAGDVG (KRAS G13D)
WVVQANDVM

SEQ ID NO: 95980 - protein, 9 aa, synthetic construct
  source 1..9: note = Seed: VVVGAGDVG (KRAS G13D)
WVVQANDVN

SEQ ID NO: 95981 - protein, 9 aa, synthetic construct
  source 1..9: note = Seed: VVVGAGDVG (KRAS G13D)
WVVQANDVQ

SEQ ID NO: 95982 - protein, 9 aa, synthetic construct
  source 1..9: note = Seed: VVVGAGDVG (KRAS G13D)
WVVQANDVS

SEQ ID NO: 95983 - protein, 9 aa, synthetic construct
  source 1..9: note = Seed: VVVGAGDVG (KRAS G13D)
WVVQANDVT

SEQ ID NO: 95984 - protein, 9 aa, synthetic construct
  source 1..9: note = Seed: VVVGAGDVG (KRAS G13D)
WVVQANDVV

SEQ ID NO: 95985 - protein, 9 aa, synthetic construct
  source 1..9: note = Seed: VVVGAGDVG (KRAS G13D)
WVVQANDVY

SEQ ID NO: 95986 - protein, 9 aa, synthetic construct
  source 1..9: note = Seed: VVVGAGDVG (KRAS G13D)
WVVQAPDVA

SEQ ID NO: 95987 - protein, 9 aa, synthetic construct
  source 1..9: note = Seed: VVVGAGDVG (KRAS G13D)
WVVQAPDVF

SEQ ID NO: 95988 - protein, 9 aa, synthetic construct
  source 1..9: note = Seed: VVVGAGDVG (KRAS G13D)
WVVQAPDVI

SEQ ID NO: 95989 - protein, 9 aa, synthetic construct
  source 1..9: note = Seed: VVVGAGDVG (KRAS G13D)
WVVQAPDVL

SEQ ID NO: 95990 - protein, 9 aa, synthetic construct
  source 1..9: note = Seed: VVVGAGDVG (KRAS G13D)
WVVQAPDVM

SEQ ID NO: 95991 - protein, 9 aa, synthetic construct
  source 1..9: note = Seed: VVVGAGDVG (KRAS G13D)
WVVQAPDVN

SEQ ID NO: 95992 - protein, 9 aa, synthetic construct
  source 1..9: note = Seed: VVVGAGDVG (KRAS G13D)
WVVQAPDVS

SEQ ID NO: 95993 - protein, 9 aa, synthetic construct
  source 1..9: note = Seed: VVVGAGDVG (KRAS G13D)
WVVQAPDVT

SEQ ID NO: 95994 - protein, 9 aa, synthetic construct
  source 1..9: note = Seed: VVVGAGDVG (KRAS G13D)
WVVQAPDVV

SEQ ID NO: 95995 - protein, 9 aa, synthetic construct
  source 1..9: note = Seed: VVVGAGDVG (KRAS G13D)
WVVQAPDVY

SEQ ID NO: 95996 - protein, 9 aa, synthetic construct
  source 1..9: note = Seed: VVVGAGDVG (KRAS G13D)
WVVQAQDVA

SEQ ID NO: 95997 - protein, 9 aa, synthetic construct
  source 1..9: note = Seed: VVVGAGDVG (KRAS G13D)
WVVQASDVA

SEQ ID NO: 95998 - protein, 9 aa, synthetic construct
  source 1..9: note = Seed: VVVGAGDVG (KRAS G13D)
WVVQASDVF

SEQ ID NO: 95999 - protein, 9 aa, synthetic construct
  source 1..9: note = Seed: VVVGAGDVG (KRAS G13D)
WVVQASDVG

SEQ ID NO: 96000 - protein, 9 aa, synthetic construct
  source 1..9: note = Seed: VVVGAGDVG (KRAS G13D)
WVVQASDVH

SEQ ID NO: 96001 - protein, 9 aa, synthetic construct
  source 1..9: note = Seed: VVVGAGDVG (KRAS G13D)
WVVQASDVI

SEQ ID NO: 96002 - protein, 9 aa, synthetic construct
  source 1..9: note = Seed: VVVGAGDVG (KRAS G13D)
WVVQASDVK

SEQ ID NO: 96003 - protein, 9 aa, synthetic construct
  source 1..9: note = Seed: VVVGAGDVG (KRAS G13D)
WVVQASDVL

SEQ ID NO: 96004 - protein, 9 aa, synthetic construct
  source 1..9: note = Seed: VVVGAGDVG (KRAS G13D)
WVVQASDVM

SEQ ID NO: 96005 - protein, 9 aa, synthetic construct
  source 1..9: note = Seed: VVVGAGDVG (KRAS G13D)
WVVQASDVN

SEQ ID NO: 96006 - protein, 9 aa, synthetic construct
  source 1..9: note = Seed: VVVGAGDVG (KRAS G13D)
WVVQASDVQ

SEQ ID NO: 96007 - protein, 9 aa, synthetic construct
  source 1..9: note = Seed: VVVGAGDVG (KRAS G13D)
WVVQASDVR

SEQ ID NO: 96008 - protein, 9 aa, synthetic construct
  source 1..9: note = Seed: VVVGAGDVG (KRAS G13D)
WVVQASDVS

SEQ ID NO: 96009 - protein, 9 aa, synthetic construct
  source 1..9: note = Seed: VVVGAGDVG (KRAS G13D)
WVVQASDVT

SEQ ID NO: 96010 - protein, 9 aa, synthetic construct
  source 1..9: note = Seed: VVVGAGDVG (KRAS G13D)
WVVQASDVV

SEQ ID NO: 96011 - protein, 9 aa, synthetic construct
  source 1..9: note = Seed: VVVGAGDVG (KRAS G13D)
WVVQASDVY

SEQ ID NO: 96012 - protein, 9 aa, synthetic construct
  source 1..9: note = Seed: VVVGAGDVG (KRAS G13D)
WVVQATDVA

SEQ ID NO: 96013 - protein, 9 aa, synthetic construct
  source 1..9: note = Seed: VVVGAGDVG (KRAS G13D)
WVVQATDVH

SEQ ID NO: 96014 - protein, 9 aa, synthetic construct
  source 1..9: note = Seed: VVVGAGDVG (KRAS G13D)
WVVQATDVI

SEQ ID NO: 96015 - protein, 9 aa, synthetic construct
  source 1..9: note = Seed: VVVGAGDVG (KRAS G13D)
WVVQATDVL

SEQ ID NO: 96016 - protein, 9 aa, synthetic construct
  source 1..9: note = Seed: VVVGAGDVG (KRAS G13D)
WVVQATDVM

SEQ ID NO: 96017 - protein, 9 aa, synthetic construct
  source 1..9: note = Seed: VVVGAGDVG (KRAS G13D)
WVVQATDVN

SEQ ID NO: 96018 - protein, 9 aa, synthetic construct
  source 1..9: note = Seed: VVVGAGDVG (KRAS G13D)
WVVQATDVQ

SEQ ID NO: 96019 - protein, 9 aa, synthetic construct
  source 1..9: note = Seed: VVVGAGDVG (KRAS G13D)
WVVQATDVS

SEQ ID NO: 96020 - protein, 9 aa, synthetic construct
  source 1..9: note = Seed: VVVGAGDVG (KRAS G13D)
WVVQATDVT

SEQ ID NO: 96021 - protein, 9 aa, synthetic construct
  source 1..9: note = Seed: VVVGAGDVG (KRAS G13D)
WVVQATDVV

SEQ ID NO: 96022 - protein, 9 aa, synthetic construct
  source 1..9: note = Seed: VVVGAGDVG (KRAS G13D)
WVVQATDVY

SEQ ID NO: 96023 - protein, 9 aa, synthetic construct
  source 1..9: note = Seed: VVVGAGDVG (KRAS G13D)
WVVQAVDVA

SEQ ID NO: 96024 - protein, 9 aa, synthetic construct
  source 1..9: note = Seed: VVVGAGDVG (KRAS G13D)
WVVQAVDVG

SEQ ID NO: 96025 - protein, 9 aa, synthetic construct
  source 1..9: note = Seed: VVVGAGDVG (KRAS G13D)
WVVQAVDVH

SEQ ID NO: 96026 - protein, 9 aa, synthetic construct
  source 1..9: note = Seed: VVVGAGDVG (KRAS G13D)
WVVQAVDVI

SEQ ID NO: 96027 - protein, 9 aa, synthetic construct
  source 1..9: note = Seed: VVVGAGDVG (KRAS G13D)
WVVQAVDVK

SEQ ID NO: 96028 - protein, 9 aa, synthetic construct
  source 1..9: note = Seed: VVVGAGDVG (KRAS G13D)
WVVQAVDVL

SEQ ID NO: 96029 - protein, 9 aa, synthetic construct
  source 1..9: note = Seed: VVVGAGDVG (KRAS G13D)
WVVQAVDVM

SEQ ID NO: 96030 - protein, 9 aa, synthetic construct
  source 1..9: note = Seed: VVVGAGDVG (KRAS G13D)
WVVQAVDVN

SEQ ID NO: 96031 - protein, 9 aa, synthetic construct
  source 1..9: note = Seed: VVVGAGDVG (KRAS G13D)
WVVQAVDVQ

SEQ ID NO: 96032 - protein, 9 aa, synthetic construct
  source 1..9: note = Seed: VVVGAGDVG (KRAS G13D)
WVVQAVDVR

SEQ ID NO: 96033 - protein, 9 aa, synthetic construct
  source 1..9: note = Seed: VVVGAGDVG (KRAS G13D)
WVVQAVDVS

SEQ ID NO: 96034 - protein, 9 aa, synthetic construct
  source 1..9: note = Seed: VVVGAGDVG (KRAS G13D)
WVVQAVDVT

SEQ ID NO: 96035 - protein, 9 aa, synthetic construct
  source 1..9: note = Seed: VVVGAGDVG (KRAS G13D)
WVVQAVDVV

SEQ ID NO: 96036 - protein, 9 aa, synthetic construct
  source 1..9: note = Seed: VVVGAGDVG (KRAS G13D)
WVVRAADVA

SEQ ID NO: 96037 - protein, 9 aa, synthetic construct
  source 1..9: note = Seed: VVVGAGDVG (KRAS G13D)
WVVRAADVC

SEQ ID NO: 96038 - protein, 9 aa, synthetic construct
  source 1..9: note = Seed: VVVGAGDVG (KRAS G13D)
WVVRAADVG

SEQ ID NO: 96039 - protein, 9 aa, synthetic construct
  source 1..9: note = Seed: VVVGAGDVG (KRAS G13D)
WVVRAADVS

SEQ ID NO: 96040 - protein, 9 aa, synthetic construct
  source 1..9: note = Seed: VVVGAGDVG (KRAS G13D)
WVVRASDVN

SEQ ID NO: 96041 - protein, 9 aa, synthetic construct
  source 1..9: note = Seed: VVVGAGDVG (KRAS G13D)
WVVRASDVS

SEQ ID NO: 96042 - protein, 9 aa, synthetic construct
  source 1..9: note = Seed: VVVGAGDVG (KRAS G13D)
WVVRATDVA

SEQ ID NO: 96043 - protein, 9 aa, synthetic construct
  source 1..9: note = Seed: VVVGAGDVG (KRAS G13D)
WVVRATDVM

SEQ ID NO: 96044 - protein, 9 aa, synthetic construct
  source 1..9: note = Seed: VVVGAGDVG (KRAS G13D)
WVVRATDVQ

SEQ ID NO: 96045 - protein, 9 aa, synthetic construct
  source 1..9: note = Seed: VVVGAGDVG (KRAS G13D)
WVVRATDVS

SEQ ID NO: 96046 - protein, 9 aa, synthetic construct
  source 1..9: note = Seed: VVVGAGDVG (KRAS G13D)
WVVSAADVA

SEQ ID NO: 96047 - protein, 9 aa, synthetic construct
  source 1..9: note = Seed: VVVGAGDVG (KRAS G13D)
WVVSAADVD

SEQ ID NO: 96048 - protein, 9 aa, synthetic construct
  source 1..9: note = Seed: VVVGAGDVG (KRAS G13D)
WVVSAADVE

SEQ ID NO: 96049 - protein, 9 aa, synthetic construct
  source 1..9: note = Seed: VVVGAGDVG (KRAS G13D)
WVVSAADVF

SEQ ID NO: 96050 - protein, 9 aa, synthetic construct
  source 1..9: note = Seed: VVVGAGDVG (KRAS G13D)
WVVSAADVG

SEQ ID NO: 96051 - protein, 9 aa, synthetic construct
  source 1..9: note = Seed: VVVGAGDVG (KRAS G13D)
WVVSAADVH

SEQ ID NO: 96052 - protein, 9 aa, synthetic construct
  source 1..9: note = Seed: VVVGAGDVG (KRAS G13D)
WVVSAADVI

SEQ ID NO: 96053 - protein, 9 aa, synthetic construct
  source 1..9: note = Seed: VVVGAGDVG (KRAS G13D)
WVVSAADVK

SEQ ID NO: 96054 - protein, 9 aa, synthetic construct
  source 1..9: note = Seed: VVVGAGDVG (KRAS G13D)
WVVSAADVL

SEQ ID NO: 96055 - protein, 9 aa, synthetic construct
  source 1..9: note = Seed: VVVGAGDVG (KRAS G13D)
WVVSAADVM

SEQ ID NO: 96056 - protein, 9 aa, synthetic construct
  source 1..9: note = Seed: VVVGAGDVG (KRAS G13D)
WVVSAADVN

SEQ ID NO: 96057 - protein, 9 aa, synthetic construct
  source 1..9: note = Seed: VVVGAGDVG (KRAS G13D)
WVVSAADVP

SEQ ID NO: 96058 - protein, 9 aa, synthetic construct
  source 1..9: note = Seed: VVVGAGDVG (KRAS G13D)
WVVSAADVQ

SEQ ID NO: 96059 - protein, 9 aa, synthetic construct
  source 1..9: note = Seed: VVVGAGDVG (KRAS G13D)
WVVSAADVR

SEQ ID NO: 96060 - protein, 9 aa, synthetic construct
  source 1..9: note = Seed: VVVGAGDVG (KRAS G13D)
WVVSAADVS

SEQ ID NO: 96061 - protein, 9 aa, synthetic construct
  source 1..9: note = Seed: VVVGAGDVG (KRAS G13D)
WVVSAADVT

SEQ ID NO: 96062 - protein, 9 aa, synthetic construct
  source 1..9: note = Seed: VVVGAGDVG (KRAS G13D)
WVVSAADVV

SEQ ID NO: 96063 - protein, 9 aa, synthetic construct
  source 1..9: note = Seed: VVVGAGDVG (KRAS G13D)
WVVSAADVY

SEQ ID NO: 96064 - protein, 9 aa, synthetic construct
  source 1..9: note = Seed: VVVGAGDVG (KRAS G13D)
WVVSAGDVA

SEQ ID NO: 96065 - protein, 9 aa, synthetic construct
  source 1..9: note = Seed: VVVGAGDVG (KRAS G13D)
WVVSAHDVA

SEQ ID NO: 96066 - protein, 9 aa, synthetic construct
  source 1..9: note = Seed: VVVGAGDVG (KRAS G13D)
WVVSAIDVA

SEQ ID NO: 96067 - protein, 9 aa, synthetic construct
  source 1..9: note = Seed: VVVGAGDVG (KRAS G13D)
WVVSAIDVH

SEQ ID NO: 96068 - protein, 9 aa, synthetic construct
  source 1..9: note = Seed: VVVGAGDVG (KRAS G13D)
WVVSAIDVM

SEQ ID NO: 96069 - protein, 9 aa, synthetic construct
  source 1..9: note = Seed: VVVGAGDVG (KRAS G13D)
WVVSAIDVN

SEQ ID NO: 96070 - protein, 9 aa, synthetic construct
  source 1..9: note = Seed: VVVGAGDVG (KRAS G13D)
WVVSAIDVQ

SEQ ID NO: 96071 - protein, 9 aa, synthetic construct
  source 1..9: note = Seed: VVVGAGDVG (KRAS G13D)
WVVSAIDVS

SEQ ID NO: 96072 - protein, 9 aa, synthetic construct
  source 1..9: note = Seed: VVVGAGDVG (KRAS G13D)
WVVSAIDVT

SEQ ID NO: 96073 - protein, 9 aa, synthetic construct
  source 1..9: note = Seed: VVVGAGDVG (KRAS G13D)
WVVSAIDVV

SEQ ID NO: 96074 - protein, 9 aa, synthetic construct
  source 1..9: note = Seed: VVVGAGDVG (KRAS G13D)
WVVSALDVS

SEQ ID NO: 96075 - protein, 9 aa, synthetic construct
  source 1..9: note = Seed: VVVGAGDVG (KRAS G13D)
WVVSANDVA

SEQ ID NO: 96076 - protein, 9 aa, synthetic construct
  source 1..9: note = Seed: VVVGAGDVG (KRAS G13D)
WVVSANDVG

SEQ ID NO: 96077 - protein, 9 aa, synthetic construct
  source 1..9: note = Seed: VVVGAGDVG (KRAS G13D)
WVVSANDVH

SEQ ID NO: 96078 - protein, 9 aa, synthetic construct
  source 1..9: note = Seed: VVVGAGDVG (KRAS G13D)
WVVSANDVI

SEQ ID NO: 96079 - protein, 9 aa, synthetic construct
  source 1..9: note = Seed: VVVGAGDVG (KRAS G13D)
WVVSANDVL

SEQ ID NO: 96080 - protein, 9 aa, synthetic construct
  source 1..9: note = Seed: VVVGAGDVG (KRAS G13D)
WVVSANDVM

SEQ ID NO: 96081 - protein, 9 aa, synthetic construct
  source 1..9: note = Seed: VVVGAGDVG (KRAS G13D)
WVVSANDVN

SEQ ID NO: 96082 - protein, 9 aa, synthetic construct
  source 1..9: note = Seed: VVVGAGDVG (KRAS G13D)
WVVSANDVQ

SEQ ID NO: 96083 - protein, 9 aa, synthetic construct
  source 1..9: note = Seed: VVVGAGDVG (KRAS G13D)
WVVSANDVS

SEQ ID NO: 96084 - protein, 9 aa, synthetic construct
  source 1..9: note = Seed: VVVGAGDVG (KRAS G13D)
WVVSANDVT

SEQ ID NO: 96085 - protein, 9 aa, synthetic construct
  source 1..9: note = Seed: VVVGAGDVG (KRAS G13D)
WVVSANDVV

SEQ ID NO: 96086 - protein, 9 aa, synthetic construct
  source 1..9: note = Seed: VVVGAGDVG (KRAS G13D)
WVVSAPDVA

SEQ ID NO: 96087 - protein, 9 aa, synthetic construct
  source 1..9: note = Seed: VVVGAGDVG (KRAS G13D)
WVVSAPDVI

SEQ ID NO: 96088 - protein, 9 aa, synthetic construct
  source 1..9: note = Seed: VVVGAGDVG (KRAS G13D)
WVVSAPDVL

SEQ ID NO: 96089 - protein, 9 aa, synthetic construct
  source 1..9: note = Seed: VVVGAGDVG (KRAS G13D)
WVVSAPDVM

SEQ ID NO: 96090 - protein, 9 aa, synthetic construct
  source 1..9: note = Seed: VVVGAGDVG (KRAS G13D)
WVVSAPDVN

SEQ ID NO: 96091 - protein, 9 aa, synthetic construct
  source 1..9: note = Seed: VVVGAGDVG (KRAS G13D)
WVVSAPDVS

SEQ ID NO: 96092 - protein, 9 aa, synthetic construct
  source 1..9: note = Seed: VVVGAGDVG (KRAS G13D)
WVVSAPDVT

SEQ ID NO: 96093 - protein, 9 aa, synthetic construct
  source 1..9: note = Seed: VVVGAGDVG (KRAS G13D)
WVVSAPDVV

SEQ ID NO: 96094 - protein, 9 aa, synthetic construct
  source 1..9: note = Seed: VVVGAGDVG (KRAS G13D)
WVVSAQDVA

SEQ ID NO: 96095 - protein, 9 aa, synthetic construct
  source 1..9: note = Seed: VVVGAGDVG (KRAS G13D)
WVVSASDVA

SEQ ID NO: 96096 - protein, 9 aa, synthetic construct
  source 1..9: note = Seed: VVVGAGDVG (KRAS G13D)
WVVSASDVF

SEQ ID NO: 96097 - protein, 9 aa, synthetic construct
  source 1..9: note = Seed: VVVGAGDVG (KRAS G13D)
WVVSASDVG

SEQ ID NO: 96098 - protein, 9 aa, synthetic construct
  source 1..9: note = Seed: VVVGAGDVG (KRAS G13D)
WVVSASDVH

SEQ ID NO: 96099 - protein, 9 aa, synthetic construct
  source 1..9: note = Seed: VVVGAGDVG (KRAS G13D)
WVVSASDVI

SEQ ID NO: 96100 - protein, 9 aa, synthetic construct
  source 1..9: note = Seed: VVVGAGDVG (KRAS G13D)
WVVSASDVL

SEQ ID NO: 96101 - protein, 9 aa, synthetic construct
  source 1..9: note = Seed: VVVGAGDVG (KRAS G13D)
WVVSASDVM

SEQ ID NO: 96102 - protein, 9 aa, synthetic construct
  source 1..9: note = Seed: VVVGAGDVG (KRAS G13D)
WVVSASDVN

SEQ ID NO: 96103 - protein, 9 aa, synthetic construct
  source 1..9: note = Seed: VVVGAGDVG (KRAS G13D)
WVVSASDVQ

SEQ ID NO: 96104 - protein, 9 aa, synthetic construct
  source 1..9: note = Seed: VVVGAGDVG (KRAS G13D)
WVVSASDVS

SEQ ID NO: 96105 - protein, 9 aa, synthetic construct
  source 1..9: note = Seed: VVVGAGDVG (KRAS G13D)
WVVSASDVT

SEQ ID NO: 96106 - protein, 9 aa, synthetic construct
  source 1..9: note = Seed: VVVGAGDVG (KRAS G13D)
WVVSASDVV

SEQ ID NO: 96107 - protein, 9 aa, synthetic construct
  source 1..9: note = Seed: VVVGAGDVG (KRAS G13D)
WVVSASDVY

SEQ ID NO: 96108 - protein, 9 aa, synthetic construct
  source 1..9: note = Seed: VVVGAGDVG (KRAS G13D)
WVVSATDVA

SEQ ID NO: 96109 - protein, 9 aa, synthetic construct
  source 1..9: note = Seed: VVVGAGDVG (KRAS G13D)
WVVSATDVH

SEQ ID NO: 96110 - protein, 9 aa, synthetic construct
  source 1..9: note = Seed: VVVGAGDVG (KRAS G13D)
WVVSATDVI

SEQ ID NO: 96111 - protein, 9 aa, synthetic construct
  source 1..9: note = Seed: VVVGAGDVG (KRAS G13D)
WVVSATDVL

SEQ ID NO: 96112 - protein, 9 aa, synthetic construct
  source 1..9: note = Seed: VVVGAGDVG (KRAS G13D)
WVVSATDVM

SEQ ID NO: 96113 - protein, 9 aa, synthetic construct
  source 1..9: note = Seed: VVVGAGDVG (KRAS G13D)
WVVSATDVN

SEQ ID NO: 96114 - protein, 9 aa, synthetic construct
  source 1..9: note = Seed: VVVGAGDVG (KRAS G13D)
WVVSATDVQ

SEQ ID NO: 96115 - protein, 9 aa, synthetic construct
  source 1..9: note = Seed: VVVGAGDVG (KRAS G13D)
WVVSATDVS

SEQ ID NO: 96116 - protein, 9 aa, synthetic construct
  source 1..9: note = Seed: VVVGAGDVG (KRAS G13D)
WVVSATDVT

SEQ ID NO: 96117 - protein, 9 aa, synthetic construct
  source 1..9: note = Seed: VVVGAGDVG (KRAS G13D)
WVVSATDVV

SEQ ID NO: 96118 - protein, 9 aa, synthetic construct
  source 1..9: note = Seed: VVVGAGDVG (KRAS G13D)
WVVSAVDVA

SEQ ID NO: 96119 - protein, 9 aa, synthetic construct
  source 1..9: note = Seed: VVVGAGDVG (KRAS G13D)
WVVSAVDVH

SEQ ID NO: 96120 - protein, 9 aa, synthetic construct
  source 1..9: note = Seed: VVVGAGDVG (KRAS G13D)
WVVSAVDVI

SEQ ID NO: 96121 - protein, 9 aa, synthetic construct
  source 1..9: note = Seed: VVVGAGDVG (KRAS G13D)
WVVSAVDVK

SEQ ID NO: 96122 - protein, 9 aa, synthetic construct
  source 1..9: note = Seed: VVVGAGDVG (KRAS G13D)
WVVSAVDVL

SEQ ID NO: 96123 - protein, 9 aa, synthetic construct
  source 1..9: note = Seed: VVVGAGDVG (KRAS G13D)
WVVSAVDVM

SEQ ID NO: 96124 - protein, 9 aa, synthetic construct
  source 1..9: note = Seed: VVVGAGDVG (KRAS G13D)
WVVSAVDVN

SEQ ID NO: 96125 - protein, 9 aa, synthetic construct
  source 1..9: note = Seed: VVVGAGDVG (KRAS G13D)
WVVSAVDVQ

SEQ ID NO: 96126 - protein, 9 aa, synthetic construct
  source 1..9: note = Seed: VVVGAGDVG (KRAS G13D)
WVVSAVDVR

SEQ ID NO: 96127 - protein, 9 aa, synthetic construct
  source 1..9: note = Seed: VVVGAGDVG (KRAS G13D)
WVVSAVDVS

SEQ ID NO: 96128 - protein, 9 aa, synthetic construct
  source 1..9: note = Seed: VVVGAGDVG (KRAS G13D)
WVVSAVDVT

SEQ ID NO: 96129 - protein, 9 aa, synthetic construct
  source 1..9: note = Seed: VVVGAGDVG (KRAS G13D)
WVVSAVDVV

SEQ ID NO: 96130 - protein, 9 aa, synthetic construct
  source 1..9: note = Seed: VVVGAGDVG (KRAS G13D)
WVVTAADVA

SEQ ID NO: 96131 - protein, 9 aa, synthetic construct
  source 1..9: note = Seed: VVVGAGDVG (KRAS G13D)
WVVTAADVE

SEQ ID NO: 96132 - protein, 9 aa, synthetic construct
  source 1..9: note = Seed: VVVGAGDVG (KRAS G13D)
WVVTAADVF

SEQ ID NO: 96133 - protein, 9 aa, synthetic construct
  source 1..9: note = Seed: VVVGAGDVG (KRAS G13D)
WVVTAADVG

SEQ ID NO: 96134 - protein, 9 aa, synthetic construct
  source 1..9: note = Seed: VVVGAGDVG (KRAS G13D)
WVVTAADVH

SEQ ID NO: 96135 - protein, 9 aa, synthetic construct
  source 1..9: note = Seed: VVVGAGDVG (KRAS G13D)
WVVTAADVI

SEQ ID NO: 96136 - protein, 9 aa, synthetic construct
  source 1..9: note = Seed: VVVGAGDVG (KRAS G13D)
WVVTAADVK

SEQ ID NO: 96137 - protein, 9 aa, synthetic construct
  source 1..9: note = Seed: VVVGAGDVG (KRAS G13D)
WVVTAADVL

SEQ ID NO: 96138 - protein, 9 aa, synthetic construct
  source 1..9: note = Seed: VVVGAGDVG (KRAS G13D)
WVVTAADVM

SEQ ID NO: 96139 - protein, 9 aa, synthetic construct
  source 1..9: note = Seed: VVVGAGDVG (KRAS G13D)
WVVTAADVN

SEQ ID NO: 96140 - protein, 9 aa, synthetic construct
  source 1..9: note = Seed: VVVGAGDVG (KRAS G13D)
WVVTAADVP

SEQ ID NO: 96141 - protein, 9 aa, synthetic construct
  source 1..9: note = Seed: VVVGAGDVG (KRAS G13D)
WVVTAADVQ

SEQ ID NO: 96142 - protein, 9 aa, synthetic construct
  source 1..9: note = Seed: VVVGAGDVG (KRAS G13D)
WVVTAADVR

SEQ ID NO: 96143 - protein, 9 aa, synthetic construct
  source 1..9: note = Seed: VVVGAGDVG (KRAS G13D)
WVVTAADVS

SEQ ID NO: 96144 - protein, 9 aa, synthetic construct
  source 1..9: note = Seed: VVVGAGDVG (KRAS G13D)
WVVTAADVT

SEQ ID NO: 96145 - protein, 9 aa, synthetic construct
  source 1..9: note = Seed: VVVGAGDVG (KRAS G13D)
WVVTAADVV

SEQ ID NO: 96146 - protein, 9 aa, synthetic construct
  source 1..9: note = Seed: VVVGAGDVG (KRAS G13D)
WVVTAADVY

SEQ ID NO: 96147 - protein, 9 aa, synthetic construct
  source 1..9: note = Seed: VVVGAGDVG (KRAS G13D)
WVVTAGDVA

SEQ ID NO: 96148 - protein, 9 aa, synthetic construct
  source 1..9: note = Seed: VVVGAGDVG (KRAS G13D)
WVVTAHDVA

SEQ ID NO: 96149 - protein, 9 aa, synthetic construct
  source 1..9: note = Seed: VVVGAGDVG (KRAS G13D)
WVVTAIDVA

SEQ ID NO: 96150 - protein, 9 aa, synthetic construct
  source 1..9: note = Seed: VVVGAGDVG (KRAS G13D)
WVVTAIDVH

SEQ ID NO: 96151 - protein, 9 aa, synthetic construct
  source 1..9: note = Seed: VVVGAGDVG (KRAS G13D)
WVVTAIDVN

SEQ ID NO: 96152 - protein, 9 aa, synthetic construct
  source 1..9: note = Seed: VVVGAGDVG (KRAS G13D)
WVVTAIDVQ

SEQ ID NO: 96153 - protein, 9 aa, synthetic construct
  source 1..9: note = Seed: VVVGAGDVG (KRAS G13D)
WVVTAIDVS

SEQ ID NO: 96154 - protein, 9 aa, synthetic construct
  source 1..9: note = Seed: VVVGAGDVG (KRAS G13D)
WVVTANDVA

SEQ ID NO: 96155 - protein, 9 aa, synthetic construct
  source 1..9: note = Seed: VVVGAGDVG (KRAS G13D)
WVVTANDVH

SEQ ID NO: 96156 - protein, 9 aa, synthetic construct
  source 1..9: note = Seed: VVVGAGDVG (KRAS G13D)
WVVTANDVL

SEQ ID NO: 96157 - protein, 9 aa, synthetic construct
  source 1..9: note = Seed: VVVGAGDVG (KRAS G13D)
WVVTANDVM

SEQ ID NO: 96158 - protein, 9 aa, synthetic construct
  source 1..9: note = Seed: VVVGAGDVG (KRAS G13D)
WVVTANDVN

SEQ ID NO: 96159 - protein, 9 aa, synthetic construct
  source 1..9: note = Seed: VVVGAGDVG (KRAS G13D)
WVVTANDVQ

SEQ ID NO: 96160 - protein, 9 aa, synthetic construct
  source 1..9: note = Seed: VVVGAGDVG (KRAS G13D)
WVVTANDVS

SEQ ID NO: 96161 - protein, 9 aa, synthetic construct
  source 1..9: note = Seed: VVVGAGDVG (KRAS G13D)
WVVTANDVT

SEQ ID NO: 96162 - protein, 9 aa, synthetic construct
  source 1..9: note = Seed: VVVGAGDVG (KRAS G13D)
WVVTANDVV

SEQ ID NO: 96163 - protein, 9 aa, synthetic construct
  source 1..9: note = Seed: VVVGAGDVG (KRAS G13D)
WVVTAPDVA

SEQ ID NO: 96164 - protein, 9 aa, synthetic construct
  source 1..9: note = Seed: VVVGAGDVG (KRAS G13D)
WVVTAPDVN

SEQ ID NO: 96165 - protein, 9 aa, synthetic construct
  source 1..9: note = Seed: VVVGAGDVG (KRAS G13D)
WVVTAPDVS

SEQ ID NO: 96166 - protein, 9 aa, synthetic construct
  source 1..9: note = Seed: VVVGAGDVG (KRAS G13D)
WVVTAPDVT

SEQ ID NO: 96167 - protein, 9 aa, synthetic construct
  source 1..9: note = Seed: VVVGAGDVG (KRAS G13D)
WVVTAPDVV

SEQ ID NO: 96168 - protein, 9 aa, synthetic construct
  source 1..9: note = Seed: VVVGAGDVG (KRAS G13D)
WVVTAPDVY

SEQ ID NO: 96169 - protein, 9 aa, synthetic construct
  source 1..9: note = Seed: VVVGAGDVG (KRAS G13D)
WVVTASDVA

SEQ ID NO: 96170 - protein, 9 aa, synthetic construct
  source 1..9: note = Seed: VVVGAGDVG (KRAS G13D)
WVVTASDVH

SEQ ID NO: 96171 - protein, 9 aa, synthetic construct
  source 1..9: note = Seed: VVVGAGDVG (KRAS G13D)
WVVTASDVI

SEQ ID NO: 96172 - protein, 9 aa, synthetic construct
  source 1..9: note = Seed: VVVGAGDVG (KRAS G13D)
WVVTASDVL

SEQ ID NO: 96173 - protein, 9 aa, synthetic construct
  source 1..9: note = Seed: VVVGAGDVG (KRAS G13D)
WVVTASDVM

SEQ ID NO: 96174 - protein, 9 aa, synthetic construct
  source 1..9: note = Seed: VVVGAGDVG (KRAS G13D)
WVVTASDVN

SEQ ID NO: 96175 - protein, 9 aa, synthetic construct
  source 1..9: note = Seed: VVVGAGDVG (KRAS G13D)
WVVTASDVQ

SEQ ID NO: 96176 - protein, 9 aa, synthetic construct
  source 1..9: note = Seed: VVVGAGDVG (KRAS G13D)
WVVTASDVS

SEQ ID NO: 96177 - protein, 9 aa, synthetic construct
  source 1..9: note = Seed: VVVGAGDVG (KRAS G13D)
WVVTASDVT

SEQ ID NO: 96178 - protein, 9 aa, synthetic construct
  source 1..9: note = Seed: VVVGAGDVG (KRAS G13D)
WVVTASDVV

SEQ ID NO: 96179 - protein, 9 aa, synthetic construct
  source 1..9: note = Seed: VVVGAGDVG (KRAS G13D)
WVVTATDVA

SEQ ID NO: 96180 - protein, 9 aa, synthetic construct
  source 1..9: note = Seed: VVVGAGDVG (KRAS G13D)
WVVTATDVH

SEQ ID NO: 96181 - protein, 9 aa, synthetic construct
  source 1..9: note = Seed: VVVGAGDVG (KRAS G13D)
WVVTATDVL

SEQ ID NO: 96182 - protein, 9 aa, synthetic construct
  source 1..9: note = Seed: VVVGAGDVG (KRAS G13D)
WVVTATDVM

SEQ ID NO: 96183 - protein, 9 aa, synthetic construct
  source 1..9: note = Seed: VVVGAGDVG (KRAS G13D)
WVVTATDVN

SEQ ID NO: 96184 - protein, 9 aa, synthetic construct
  source 1..9: note = Seed: VVVGAGDVG (KRAS G13D)
WVVTATDVQ

SEQ ID NO: 96185 - protein, 9 aa, synthetic construct
  source 1..9: note = Seed: VVVGAGDVG (KRAS G13D)
WVVTATDVS

SEQ ID NO: 96186 - protein, 9 aa, synthetic construct
  source 1..9: note = Seed: VVVGAGDVG (KRAS G13D)
WVVTATDVT

SEQ ID NO: 96187 - protein, 9 aa, synthetic construct
  source 1..9: note = Seed: VVVGAGDVG (KRAS G13D)
WVVTATDVV

SEQ ID NO: 96188 - protein, 9 aa, synthetic construct
  source 1..9: note = Seed: VVVGAGDVG (KRAS G13D)
WVVTAVDVA

SEQ ID NO: 96189 - protein, 9 aa, synthetic construct
  source 1..9: note = Seed: VVVGAGDVG (KRAS G13D)
WVVTAVDVH

SEQ ID NO: 96190 - protein, 9 aa, synthetic construct
  source 1..9: note = Seed: VVVGAGDVG (KRAS G13D)
WVVTAVDVN

SEQ ID NO: 96191 - protein, 9 aa, synthetic construct
  source 1..9: note = Seed: VVVGAGDVG (KRAS G13D)
WVVTAVDVS

SEQ ID NO: 96192 - protein, 9 aa, synthetic construct
  source 1..9: note = Seed: VVVGAGDVG (KRAS G13D)
WVVTAVDVT

SEQ ID NO: 96193 - protein, 9 aa, synthetic construct
  source 1..9: note = Seed: VVVGAGDVG (KRAS G13D)
WVVVAADVA

SEQ ID NO: 96194 - protein, 9 aa, synthetic construct
  source 1..9: note = Seed: VVVGAGDVG (KRAS G13D)
WVVVAADVD

SEQ ID NO: 96195 - protein, 9 aa, synthetic construct
  source 1..9: note = Seed: VVVGAGDVG (KRAS G13D)
WVVVAADVE

SEQ ID NO: 96196 - protein, 9 aa, synthetic construct
  source 1..9: note = Seed: VVVGAGDVG (KRAS G13D)
WVVVAADVF

SEQ ID NO: 96197 - protein, 9 aa, synthetic construct
  source 1..9: note = Seed: VVVGAGDVG (KRAS G13D)
WVVVAADVG

SEQ ID NO: 96198 - protein, 9 aa, synthetic construct
  source 1..9: note = Seed: VVVGAGDVG (KRAS G13D)
WVVVAADVH

SEQ ID NO: 96199 - protein, 9 aa, synthetic construct
  source 1..9: note = Seed: VVVGAGDVG (KRAS G13D)
WVVVAADVI

SEQ ID NO: 96200 - protein, 9 aa, synthetic construct
  source 1..9: note = Seed: VVVGAGDVG (KRAS G13D)
WVVVAADVK

SEQ ID NO: 96201 - protein, 9 aa, synthetic construct
  source 1..9: note = Seed: VVVGAGDVG (KRAS G13D)
WVVVAADVL

SEQ ID NO: 96202 - protein, 9 aa, synthetic construct
  source 1..9: note = Seed: VVVGAGDVG (KRAS G13D)
WVVVAADVM

SEQ ID NO: 96203 - protein, 9 aa, synthetic construct
  source 1..9: note = Seed: VVVGAGDVG (KRAS G13D)
WVVVAADVN

SEQ ID NO: 96204 - protein, 9 aa, synthetic construct
  source 1..9: note = Seed: VVVGAGDVG (KRAS G13D)
WVVVAADVP

SEQ ID NO: 96205 - protein, 9 aa, synthetic construct
  source 1..9: note = Seed: VVVGAGDVG (KRAS G13D)
WVVVAADVQ

SEQ ID NO: 96206 - protein, 9 aa, synthetic construct
  source 1..9: note = Seed: VVVGAGDVG (KRAS G13D)
WVVVAADVR

SEQ ID NO: 96207 - protein, 9 aa, synthetic construct
  source 1..9: note = Seed: VVVGAGDVG (KRAS G13D)
WVVVAADVS

SEQ ID NO: 96208 - protein, 9 aa, synthetic construct
  source 1..9: note = Seed: VVVGAGDVG (KRAS G13D)
WVVVAADVT

SEQ ID NO: 96209 - protein, 9 aa, synthetic construct
  source 1..9: note = Seed: VVVGAGDVG (KRAS G13D)
WVVVAADVV

SEQ ID NO: 96210 - protein, 9 aa, synthetic construct
  source 1..9: note = Seed: VVVGAGDVG (KRAS G13D)
WVVVAADVY

SEQ ID NO: 96211 - protein, 9 aa, synthetic construct
  source 1..9: note = Seed: VVVGAGDVG (KRAS G13D)
WVVVAEDVA

SEQ ID NO: 96212 - protein, 9 aa, synthetic construct
  source 1..9: note = Seed: VVVGAGDVG (KRAS G13D)
WVVVAGDVA

SEQ ID NO: 96213 - protein, 9 aa, synthetic construct
  source 1..9: note = Seed: VVVGAGDVG (KRAS G13D)
WVVVAGDVN

SEQ ID NO: 96214 - protein, 9 aa, synthetic construct
  source 1..9: note = Seed: VVVGAGDVG (KRAS G13D)
WVVVAGDVS

SEQ ID NO: 96215 - protein, 9 aa, synthetic construct
  source 1..9: note = Seed: VVVGAGDVG (KRAS G13D)
WVVVAHDVA

SEQ ID NO: 96216 - protein, 9 aa, synthetic construct
  source 1..9: note = Seed: VVVGAGDVG (KRAS G13D)
WVVVAIDVN

SEQ ID NO: 96217 - protein, 9 aa, synthetic construct
  source 1..9: note = Seed: VVVGAGDVG (KRAS G13D)
WVVVAIDVS

SEQ ID NO: 96218 - protein, 9 aa, synthetic construct
  source 1..9: note = Seed: VVVGAGDVG (KRAS G13D)
WVVVAIDVT

SEQ ID NO: 96219 - protein, 9 aa, synthetic construct
  source 1..9: note = Seed: VVVGAGDVG (KRAS G13D)
WVVVANDVA

SEQ ID NO: 96220 - protein, 9 aa, synthetic construct
  source 1..9: note = Seed: VVVGAGDVG (KRAS G13D)
WVVVANDVG

SEQ ID NO: 96221 - protein, 9 aa, synthetic construct
  source 1..9: note = Seed: VVVGAGDVG (KRAS G13D)
WVVVANDVH

SEQ ID NO: 96222 - protein, 9 aa, synthetic construct
  source 1..9: note = Seed: VVVGAGDVG (KRAS G13D)
WVVVANDVI

SEQ ID NO: 96223 - protein, 9 aa, synthetic construct
  source 1..9: note = Seed: VVVGAGDVG (KRAS G13D)
WVVVANDVK

SEQ ID NO: 96224 - protein, 9 aa, synthetic construct
  source 1..9: note = Seed: VVVGAGDVG (KRAS G13D)
WVVVANDVL

SEQ ID NO: 96225 - protein, 9 aa, synthetic construct
  source 1..9: note = Seed: VVVGAGDVG (KRAS G13D)
WVVVANDVM

SEQ ID NO: 96226 - protein, 9 aa, synthetic construct
  source 1..9: note = Seed: VVVGAGDVG (KRAS G13D)
WVVVANDVN

SEQ ID NO: 96227 - protein, 9 aa, synthetic construct
  source 1..9: note = Seed: VVVGAGDVG (KRAS G13D)
WVVVANDVP

SEQ ID NO: 96228 - protein, 9 aa, synthetic construct
  source 1..9: note = Seed: VVVGAGDVG (KRAS G13D)
WVVVANDVQ

SEQ ID NO: 96229 - protein, 9 aa, synthetic construct
  source 1..9: note = Seed: VVVGAGDVG (KRAS G13D)
WVVVANDVR

SEQ ID NO: 96230 - protein, 9 aa, synthetic construct
  source 1..9: note = Seed: VVVGAGDVG (KRAS G13D)
WVVVANDVS

SEQ ID NO: 96231 - protein, 9 aa, synthetic construct
  source 1..9: note = Seed: VVVGAGDVG (KRAS G13D)
WVVVANDVT

SEQ ID NO: 96232 - protein, 9 aa, synthetic construct
  source 1..9: note = Seed: VVVGAGDVG (KRAS G13D)
WVVVANDVV

SEQ ID NO: 96233 - protein, 9 aa, synthetic construct
  source 1..9: note = Seed: VVVGAGDVG (KRAS G13D)
WVVVANDVY

SEQ ID NO: 96234 - protein, 9 aa, synthetic construct
  source 1..9: note = Seed: VVVGAGDVG (KRAS G13D)
WVVVAPDVA

SEQ ID NO: 96235 - protein, 9 aa, synthetic construct
  source 1..9: note = Seed: VVVGAGDVG (KRAS G13D)
WVVVAPDVF

SEQ ID NO: 96236 - protein, 9 aa, synthetic construct
  source 1..9: note = Seed: VVVGAGDVG (KRAS G13D)
WVVVAPDVG

SEQ ID NO: 96237 - protein, 9 aa, synthetic construct
  source 1..9: note = Seed: VVVGAGDVG (KRAS G13D)
WVVVAPDVH

SEQ ID NO: 96238 - protein, 9 aa, synthetic construct
  source 1..9: note = Seed: VVVGAGDVG (KRAS G13D)
WVVVAPDVI

SEQ ID NO: 96239 - protein, 9 aa, synthetic construct
  source 1..9: note = Seed: VVVGAGDVG (KRAS G13D)
WVVVAPDVK

SEQ ID NO: 96240 - protein, 9 aa, synthetic construct
  source 1..9: note = Seed: VVVGAGDVG (KRAS G13D)
WVVVAPDVL

SEQ ID NO: 96241 - protein, 9 aa, synthetic construct
  source 1..9: note = Seed: VVVGAGDVG (KRAS G13D)
WVVVAPDVM

SEQ ID NO: 96242 - protein, 9 aa, synthetic construct
  source 1..9: note = Seed: VVVGAGDVG (KRAS G13D)
WVVVAPDVN

SEQ ID NO: 96243 - protein, 9 aa, synthetic construct
  source 1..9: note = Seed: VVVGAGDVG (KRAS G13D)
WVVVAPDVQ

SEQ ID NO: 96244 - protein, 9 aa, synthetic construct
  source 1..9: note = Seed: VVVGAGDVG (KRAS G13D)
WVVVAPDVS

SEQ ID NO: 96245 - protein, 9 aa, synthetic construct
  source 1..9: note = Seed: VVVGAGDVG (KRAS G13D)
WVVVAPDVT

SEQ ID NO: 96246 - protein, 9 aa, synthetic construct
  source 1..9: note = Seed: VVVGAGDVG (KRAS G13D)
WVVVAPDVV

SEQ ID NO: 96247 - protein, 9 aa, synthetic construct
  source 1..9: note = Seed: VVVGAGDVG (KRAS G13D)
WVVVAPDVY

SEQ ID NO: 96248 - protein, 9 aa, synthetic construct
  source 1..9: note = Seed: VVVGAGDVG (KRAS G13D)
WVVVAQDVS

SEQ ID NO: 96249 - protein, 9 aa, synthetic construct
  source 1..9: note = Seed: VVVGAGDVG (KRAS G13D)
WVVVASDVA

SEQ ID NO: 96250 - protein, 9 aa, synthetic construct
  source 1..9: note = Seed: VVVGAGDVG (KRAS G13D)
WVVVASDVG

SEQ ID NO: 96251 - protein, 9 aa, synthetic construct
  source 1..9: note = Seed: VVVGAGDVG (KRAS G13D)
WVVVASDVH

SEQ ID NO: 96252 - protein, 9 aa, synthetic construct
  source 1..9: note = Seed: VVVGAGDVG (KRAS G13D)
WVVVASDVI

SEQ ID NO: 96253 - protein, 9 aa, synthetic construct
  source 1..9: note = Seed: VVVGAGDVG (KRAS G13D)
WVVVASDVK

SEQ ID NO: 96254 - protein, 9 aa, synthetic construct
  source 1..9: note = Seed: VVVGAGDVG (KRAS G13D)
WVVVASDVL

SEQ ID NO: 96255 - protein, 9 aa, synthetic construct
  source 1..9: note = Seed: VVVGAGDVG (KRAS G13D)
WVVVASDVM

SEQ ID NO: 96256 - protein, 9 aa, synthetic construct
  source 1..9: note = Seed: VVVGAGDVG (KRAS G13D)
WVVVASDVN

SEQ ID NO: 96257 - protein, 9 aa, synthetic construct
  source 1..9: note = Seed: VVVGAGDVG (KRAS G13D)
WVVVASDVP

SEQ ID NO: 96258 - protein, 9 aa, synthetic construct
  source 1..9: note = Seed: VVVGAGDVG (KRAS G13D)
WVVVASDVQ

SEQ ID NO: 96259 - protein, 9 aa, synthetic construct
  source 1..9: note = Seed: VVVGAGDVG (KRAS G13D)
WVVVASDVR

SEQ ID NO: 96260 - protein, 9 aa, synthetic construct
  source 1..9: note = Seed: VVVGAGDVG (KRAS G13D)
WVVVASDVS

SEQ ID NO: 96261 - protein, 9 aa, synthetic construct
  source 1..9: note = Seed: VVVGAGDVG (KRAS G13D)
WVVVASDVT

SEQ ID NO: 96262 - protein, 9 aa, synthetic construct
  source 1..9: note = Seed: VVVGAGDVG (KRAS G13D)
WVVVASDVV

SEQ ID NO: 96263 - protein, 9 aa, synthetic construct
  source 1..9: note = Seed: VVVGAGDVG (KRAS G13D)
WVVVASDVY

SEQ ID NO: 96264 - protein, 9 aa, synthetic construct
  source 1..9: note = Seed: VVVGAGDVG (KRAS G13D)
WVVVATDVA

SEQ ID NO: 96265 - protein, 9 aa, synthetic construct
  source 1..9: note = Seed: VVVGAGDVG (KRAS G13D)
WVVVATDVG

SEQ ID NO: 96266 - protein, 9 aa, synthetic construct
  source 1..9: note = Seed: VVVGAGDVG (KRAS G13D)
WVVVATDVH

SEQ ID NO: 96267 - protein, 9 aa, synthetic construct
  source 1..9: note = Seed: VVVGAGDVG (KRAS G13D)
WVVVATDVI

SEQ ID NO: 96268 - protein, 9 aa, synthetic construct
  source 1..9: note = Seed: VVVGAGDVG (KRAS G13D)
WVVVATDVK

SEQ ID NO: 96269 - protein, 9 aa, synthetic construct
  source 1..9: note = Seed: VVVGAGDVG (KRAS G13D)
WVVVATDVL

SEQ ID NO: 96270 - protein, 9 aa, synthetic construct
  source 1..9: note = Seed: VVVGAGDVG (KRAS G13D)
WVVVATDVM

SEQ ID NO: 96271 - protein, 9 aa, synthetic construct
  source 1..9: note = Seed: VVVGAGDVG (KRAS G13D)
WVVVATDVN

SEQ ID NO: 96272 - protein, 9 aa, synthetic construct
  source 1..9: note = Seed: VVVGAGDVG (KRAS G13D)
WVVVATDVQ

SEQ ID NO: 96273 - protein, 9 aa, synthetic construct
  source 1..9: note = Seed: VVVGAGDVG (KRAS G13D)
WVVVATDVR

SEQ ID NO: 96274 - protein, 9 aa, synthetic construct
  source 1..9: note = Seed: VVVGAGDVG (KRAS G13D)
WVVVATDVS

SEQ ID NO: 96275 - protein, 9 aa, synthetic construct
  source 1..9: note = Seed: VVVGAGDVG (KRAS G13D)
WVVVATDVT

SEQ ID NO: 96276 - protein, 9 aa, synthetic construct
  source 1..9: note = Seed: VVVGAGDVG (KRAS G13D)
WVVVATDVV

SEQ ID NO: 96277 - protein, 9 aa, synthetic construct
  source 1..9: note = Seed: VVVGAGDVG (KRAS G13D)
WVVVATDVY

SEQ ID NO: 96278 - protein, 9 aa, synthetic construct
  source 1..9: note = Seed: VVVGAGDVG (KRAS G13D)
WVVVAVDVA

SEQ ID NO: 96279 - protein, 9 aa, synthetic construct
  source 1..9: note = Seed: VVVGAGDVG (KRAS G13D)
WVVVAVDVH

SEQ ID NO: 96280 - protein, 9 aa, synthetic construct
  source 1..9: note = Seed: VVVGAGDVG (KRAS G13D)
WVVVAVDVN

SEQ ID NO: 96281 - protein, 9 aa, synthetic construct
  source 1..9: note = Seed: VVVGAGDVG (KRAS G13D)
WVVVAVDVQ

SEQ ID NO: 96282 - protein, 9 aa, synthetic construct
  source 1..9: note = Seed: VVVGAGDVG (KRAS G13D)
WVVVAVDVS

SEQ ID NO: 96283 - protein, 9 aa, synthetic construct
  source 1..9: note = Seed: VVVGAGDVG (KRAS G13D)
WVVWAADVA

SEQ ID NO: 96284 - protein, 9 aa, synthetic construct
  source 1..9: note = Seed: VVVGAGDVG (KRAS G13D)
WVVWAADVF

SEQ ID NO: 96285 - protein, 9 aa, synthetic construct
  source 1..9: note = Seed: VVVGAGDVG (KRAS G13D)
WVVWAADVH

SEQ ID NO: 96286 - protein, 9 aa, synthetic construct
  source 1..9: note = Seed: VVVGAGDVG (KRAS G13D)
WVVWAADVI

SEQ ID NO: 96287 - protein, 9 aa, synthetic construct
  source 1..9: note = Seed: VVVGAGDVG (KRAS G13D)
WVVWAADVL

SEQ ID NO: 96288 - protein, 9 aa, synthetic construct
  source 1..9: note = Seed: VVVGAGDVG (KRAS G13D)
WVVWAADVM

SEQ ID NO: 96289 - protein, 9 aa, synthetic construct
  source 1..9: note = Seed: VVVGAGDVG (KRAS G13D)
WVVWAADVN

SEQ ID NO: 96290 - protein, 9 aa, synthetic construct
  source 1..9: note = Seed: VVVGAGDVG (KRAS G13D)
WVVWAADVQ

SEQ ID NO: 96291 - protein, 9 aa, synthetic construct
  source 1..9: note = Seed: VVVGAGDVG (KRAS G13D)
WVVWAADVS

SEQ ID NO: 96292 - protein, 9 aa, synthetic construct
  source 1..9: note = Seed: VVVGAGDVG (KRAS G13D)
WVVWAADVT

SEQ ID NO: 96293 - protein, 9 aa, synthetic construct
  source 1..9: note = Seed: VVVGAGDVG (KRAS G13D)
WVVWAADVV

SEQ ID NO: 96294 - protein, 9 aa, synthetic construct
  source 1..9: note = Seed: VVVGAGDVG (KRAS G13D)
WVVWAADVY

SEQ ID NO: 96295 - protein, 9 aa, synthetic construct
  source 1..9: note = Seed: VVVGAGDVG (KRAS G13D)
WVVWADDVA

SEQ ID NO: 96296 - protein, 9 aa, synthetic construct
  source 1..9: note = Seed: VVVGAGDVG (KRAS G13D)
WVVWADDVF

SEQ ID NO: 96297 - protein, 9 aa, synthetic construct
  source 1..9: note = Seed: VVVGAGDVG (KRAS G13D)
WVVWADDVI

SEQ ID NO: 96298 - protein, 9 aa, synthetic construct
  source 1..9: note = Seed: VVVGAGDVG (KRAS G13D)
WVVWADDVL

SEQ ID NO: 96299 - protein, 9 aa, synthetic construct
  source 1..9: note = Seed: VVVGAGDVG (KRAS G13D)
WVVWADDVM

SEQ ID NO: 96300 - protein, 9 aa, synthetic construct
  source 1..9: note = Seed: VVVGAGDVG (KRAS G13D)
WVVWADDVV

SEQ ID NO: 96301 - protein, 9 aa, synthetic construct
  source 1..9: note = Seed: VVVGAGDVG (KRAS G13D)
WVVWADDVY

SEQ ID NO: 96302 - protein, 9 aa, synthetic construct
  source 1..9: note = Seed: VVVGAGDVG (KRAS G13D)
WVVWAIDVA

SEQ ID NO: 96303 - protein, 9 aa, synthetic construct
  source 1..9: note = Seed: VVVGAGDVG (KRAS G13D)
WVVWAIDVF

SEQ ID NO: 96304 - protein, 9 aa, synthetic construct
  source 1..9: note = Seed: VVVGAGDVG (KRAS G13D)
WVVWAIDVI

SEQ ID NO: 96305 - protein, 9 aa, synthetic construct
  source 1..9: note = Seed: VVVGAGDVG (KRAS G13D)
WVVWAIDVL

SEQ ID NO: 96306 - protein, 9 aa, synthetic construct
  source 1..9: note = Seed: VVVGAGDVG (KRAS G13D)
WVVWAIDVM

SEQ ID NO: 96307 - protein, 9 aa, synthetic construct
  source 1..9: note = Seed: VVVGAGDVG (KRAS G13D)
WVVWAIDVN

SEQ ID NO: 96308 - protein, 9 aa, synthetic construct
  source 1..9: note = Seed: VVVGAGDVG (KRAS G13D)
WVVWAIDVQ

SEQ ID NO: 96309 - protein, 9 aa, synthetic construct
  source 1..9: note = Seed: VVVGAGDVG (KRAS G13D)
WVVWAIDVS

SEQ ID NO: 96310 - protein, 9 aa, synthetic construct
  source 1..9: note = Seed: VVVGAGDVG (KRAS G13D)
WVVWAIDVV

SEQ ID NO: 96311 - protein, 9 aa, synthetic construct
  source 1..9: note = Seed: VVVGAGDVG (KRAS G13D)
WVVWAIDVY

SEQ ID NO: 96312 - protein, 9 aa, synthetic construct
  source 1..9: note = Seed: VVVGAGDVG (KRAS G13D)
WVVWALDVA

SEQ ID NO: 96313 - protein, 9 aa, synthetic construct
  source 1..9: note = Seed: VVVGAGDVG (KRAS G13D)
WVVWAMDVF

SEQ ID NO: 96314 - protein, 9 aa, synthetic construct
  source 1..9: note = Seed: VVVGAGDVG (KRAS G13D)
WVVWAMDVI

SEQ ID NO: 96315 - protein, 9 aa, synthetic construct
  source 1..9: note = Seed: VVVGAGDVG (KRAS G13D)
WVVWAMDVL

SEQ ID NO: 96316 - protein, 9 aa, synthetic construct
  source 1..9: note = Seed: VVVGAGDVG (KRAS G13D)
WVVWAMDVM

SEQ ID NO: 96317 - protein, 9 aa, synthetic construct
  source 1..9: note = Seed: VVVGAGDVG (KRAS G13D)
WVVWAMDVV

SEQ ID NO: 96318 - protein, 9 aa, synthetic construct
  source 1..9: note = Seed: VVVGAGDVG (KRAS G13D)
WVVWAMDVY

SEQ ID NO: 96319 - protein, 9 aa, synthetic construct
  source 1..9: note = Seed: VVVGAGDVG (KRAS G13D)
WVVWANDVA

SEQ ID NO: 96320 - protein, 9 aa, synthetic construct
  source 1..9: note = Seed: VVVGAGDVG (KRAS G13D)
WVVWANDVF

SEQ ID NO: 96321 - protein, 9 aa, synthetic construct
  source 1..9: note = Seed: VVVGAGDVG (KRAS G13D)
WVVWANDVI

SEQ ID NO: 96322 - protein, 9 aa, synthetic construct
  source 1..9: note = Seed: VVVGAGDVG (KRAS G13D)
WVVWANDVL

SEQ ID NO: 96323 - protein, 9 aa, synthetic construct
  source 1..9: note = Seed: VVVGAGDVG (KRAS G13D)
WVVWANDVM

SEQ ID NO: 96324 - protein, 9 aa, synthetic construct
  source 1..9: note = Seed: VVVGAGDVG (KRAS G13D)
WVVWANDVQ

SEQ ID NO: 96325 - protein, 9 aa, synthetic construct
  source 1..9: note = Seed: VVVGAGDVG (KRAS G13D)
WVVWANDVS

SEQ ID NO: 96326 - protein, 9 aa, synthetic construct
  source 1..9: note = Seed: VVVGAGDVG (KRAS G13D)
WVVWANDVV

SEQ ID NO: 96327 - protein, 9 aa, synthetic construct
  source 1..9: note = Seed: VVVGAGDVG (KRAS G13D)
WVVWANDVW

SEQ ID NO: 96328 - protein, 9 aa, synthetic construct
  source 1..9: note = Seed: VVVGAGDVG (KRAS G13D)
WVVWANDVY

SEQ ID NO: 96329 - protein, 9 aa, synthetic construct
  source 1..9: note = Seed: VVVGAGDVG (KRAS G13D)
WVVWAPDVA

SEQ ID NO: 96330 - protein, 9 aa, synthetic construct
  source 1..9: note = Seed: VVVGAGDVG (KRAS G13D)
WVVWAPDVI

SEQ ID NO: 96331 - protein, 9 aa, synthetic construct
  source 1..9: note = Seed: VVVGAGDVG (KRAS G13D)
WVVWAPDVL

SEQ ID NO: 96332 - protein, 9 aa, synthetic construct
  source 1..9: note = Seed: VVVGAGDVG (KRAS G13D)
WVVWAPDVM

SEQ ID NO: 96333 - protein, 9 aa, synthetic construct
  source 1..9: note = Seed: VVVGAGDVG (KRAS G13D)
WVVWAPDVS

SEQ ID NO: 96334 - protein, 9 aa, synthetic construct
  source 1..9: note = Seed: VVVGAGDVG (KRAS G13D)
WVVWAPDVV

SEQ ID NO: 96335 - protein, 9 aa, synthetic construct
  source 1..9: note = Seed: VVVGAGDVG (KRAS G13D)
WVVWAPDVY

SEQ ID NO: 96336 - protein, 9 aa, synthetic construct
  source 1..9: note = Seed: VVVGAGDVG (KRAS G13D)
WVVWASDVA

SEQ ID NO: 96337 - protein, 9 aa, synthetic construct
  source 1..9: note = Seed: VVVGAGDVG (KRAS G13D)
WVVWASDVF

SEQ ID NO: 96338 - protein, 9 aa, synthetic construct
  source 1..9: note = Seed: VVVGAGDVG (KRAS G13D)
WVVWASDVI

SEQ ID NO: 96339 - protein, 9 aa, synthetic construct
  source 1..9: note = Seed: VVVGAGDVG (KRAS G13D)
WVVWASDVL

SEQ ID NO: 96340 - protein, 9 aa, synthetic construct
  source 1..9: note = Seed: VVVGAGDVG (KRAS G13D)
WVVWASDVM

SEQ ID NO: 96341 - protein, 9 aa, synthetic construct
  source 1..9: note = Seed: VVVGAGDVG (KRAS G13D)
WVVWASDVS

SEQ ID NO: 96342 - protein, 9 aa, synthetic construct
  source 1..9: note = Seed: VVVGAGDVG (KRAS G13D)
WVVWASDVV

SEQ ID NO: 96343 - protein, 9 aa, synthetic construct
  source 1..9: note = Seed: VVVGAGDVG (KRAS G13D)
WVVWASDVY

SEQ ID NO: 96344 - protein, 9 aa, synthetic construct
  source 1..9: note = Seed: VVVGAGDVG (KRAS G13D)
WVVWATDVA

SEQ ID NO: 96345 - protein, 9 aa, synthetic construct
  source 1..9: note = Seed: VVVGAGDVG (KRAS G13D)
WVVWATDVL

SEQ ID NO: 96346 - protein, 9 aa, synthetic construct
  source 1..9: note = Seed: VVVGAGDVG (KRAS G13D)
WVVWATDVS

SEQ ID NO: 96347 - protein, 9 aa, synthetic construct
  source 1..9: note = Seed: VVVGAGDVG (KRAS G13D)
WVVWAVDVA

SEQ ID NO: 96348 - protein, 9 aa, synthetic construct
  source 1..9: note = Seed: VVVGAGDVG (KRAS G13D)
WVVWAVDVI

SEQ ID NO: 96349 - protein, 9 aa, synthetic construct
  source 1..9: note = Seed: VVVGAGDVG (KRAS G13D)
WVVWAVDVL

SEQ ID NO: 96350 - protein, 9 aa, synthetic construct
  source 1..9: note = Seed: VVVGAGDVG (KRAS G13D)
WVVWAVDVM

SEQ ID NO: 96351 - protein, 9 aa, synthetic construct
  source 1..9: note = Seed: VVVGAGDVG (KRAS G13D)
WVVWAVDVN

SEQ ID NO: 96352 - protein, 9 aa, synthetic construct
  source 1..9: note = Seed: VVVGAGDVG (KRAS G13D)
WVVWAVDVV

SEQ ID NO: 96353 - protein, 9 aa, synthetic construct
  source 1..9: note = Seed: VVVGAGDVG (KRAS G13D)
WVVWAVDVY

SEQ ID NO: 96354 - protein, 9 aa, synthetic construct
  source 1..9: note = Seed: VVVGAGDVG (KRAS G13D)
WVVYAADVA

SEQ ID NO: 96355 - protein, 9 aa, synthetic construct
  source 1..9: note = Seed: VVVGAGDVG (KRAS G13D)
WVVYAADVI

SEQ ID NO: 96356 - protein, 9 aa, synthetic construct
  source 1..9: note = Seed: VVVGAGDVG (KRAS G13D)
WVVYAADVL

SEQ ID NO: 96357 - protein, 9 aa, synthetic construct
  source 1..9: note = Seed: VVVGAGDVG (KRAS G13D)
WVVYAADVM

SEQ ID NO: 96358 - protein, 9 aa, synthetic construct
  source 1..9: note = Seed: VVVGAGDVG (KRAS G13D)
WVVYAADVN

SEQ ID NO: 96359 - protein, 9 aa, synthetic construct
  source 1..9: note = Seed: VVVGAGDVG (KRAS G13D)
WVVYAADVQ

SEQ ID NO: 96360 - protein, 9 aa, synthetic construct
  source 1..9: note = Seed: VVVGAGDVG (KRAS G13D)
WVVYAADVS

SEQ ID NO: 96361 - protein, 9 aa, synthetic construct
  source 1..9: note = Seed: VVVGAGDVG (KRAS G13D)
WVVYAADVV

SEQ ID NO: 96362 - protein, 9 aa, synthetic construct
  source 1..9: note = Seed: VVVGAGDVG (KRAS G13D)
WVVYAADVY

SEQ ID NO: 96363 - protein, 9 aa, synthetic construct
  source 1..9: note = Seed: VVVGAGDVG (KRAS G13D)
WVVYADDVA

SEQ ID NO: 96364 - protein, 9 aa, synthetic construct
  source 1..9: note = Seed: VVVGAGDVG (KRAS G13D)
WVVYADDVF

SEQ ID NO: 96365 - protein, 9 aa, synthetic construct
  source 1..9: note = Seed: VVVGAGDVG (KRAS G13D)
WVVYADDVI

SEQ ID NO: 96366 - protein, 9 aa, synthetic construct
  source 1..9: note = Seed: VVVGAGDVG (KRAS G13D)
WVVYADDVL

SEQ ID NO: 96367 - protein, 9 aa, synthetic construct
  source 1..9: note = Seed: VVVGAGDVG (KRAS G13D)
WVVYADDVM

SEQ ID NO: 96368 - protein, 9 aa, synthetic construct
  source 1..9: note = Seed: VVVGAGDVG (KRAS G13D)
WVVYADDVV

SEQ ID NO: 96369 - protein, 9 aa, synthetic construct
  source 1..9: note = Seed: VVVGAGDVG (KRAS G13D)
WVVYADDVY

SEQ ID NO: 96370 - protein, 9 aa, synthetic construct
  source 1..9: note = Seed: VVVGAGDVG (KRAS G13D)
WVVYAIDVA

SEQ ID NO: 96371 - protein, 9 aa, synthetic construct
  source 1..9: note = Seed: VVVGAGDVG (KRAS G13D)
WVVYAIDVM

SEQ ID NO: 96372 - protein, 9 aa, synthetic construct
  source 1..9: note = Seed: VVVGAGDVG (KRAS G13D)
WVVYAIDVR

SEQ ID NO: 96373 - protein, 9 aa, synthetic construct
  source 1..9: note = Seed: VVVGAGDVG (KRAS G13D)
WVVYAIDVV

SEQ ID NO: 96374 - protein, 9 aa, synthetic construct
  source 1..9: note = Seed: VVVGAGDVG (KRAS G13D)
WVVYAIDVY

SEQ ID NO: 96375 - protein, 9 aa, synthetic construct
  source 1..9: note = Seed: VVVGAGDVG (KRAS G13D)
WVVYALDVA

SEQ ID NO: 96376 - protein, 9 aa, synthetic construct
  source 1..9: note = Seed: VVVGAGDVG (KRAS G13D)
WVVYAMDVF

SEQ ID NO: 96377 - protein, 9 aa, synthetic construct
  source 1..9: note = Seed: VVVGAGDVG (KRAS G13D)
WVVYAMDVI

SEQ ID NO: 96378 - protein, 9 aa, synthetic construct
  source 1..9: note = Seed: VVVGAGDVG (KRAS G13D)
WVVYAMDVM

SEQ ID NO: 96379 - protein, 9 aa, synthetic construct
  source 1..9: note = Seed: VVVGAGDVG (KRAS G13D)
WVVYAMDVS

SEQ ID NO: 96380 - protein, 9 aa, synthetic construct
  source 1..9: note = Seed: VVVGAGDVG (KRAS G13D)
WVVYAMDVV

SEQ ID NO: 96381 - protein, 9 aa, synthetic construct
  source 1..9: note = Seed: VVVGAGDVG (KRAS G13D)
WVVYAMDVY

SEQ ID NO: 96382 - protein, 9 aa, synthetic construct
  source 1..9: note = Seed: VVVGAGDVG (KRAS G13D)
WVVYANDVA

SEQ ID NO: 96383 - protein, 9 aa, synthetic construct
  source 1..9: note = Seed: VVVGAGDVG (KRAS G13D)
WVVYANDVF

SEQ ID NO: 96384 - protein, 9 aa, synthetic construct
  source 1..9: note = Seed: VVVGAGDVG (KRAS G13D)
WVVYANDVI

SEQ ID NO: 96385 - protein, 9 aa, synthetic construct
  source 1..9: note = Seed: VVVGAGDVG (KRAS G13D)
WVVYANDVL

SEQ ID NO: 96386 - protein, 9 aa, synthetic construct
  source 1..9: note = Seed: VVVGAGDVG (KRAS G13D)
WVVYANDVM

SEQ ID NO: 96387 - protein, 9 aa, synthetic construct
  source 1..9: note = Seed: VVVGAGDVG (KRAS G13D)
WVVYANDVQ

SEQ ID NO: 96388 - protein, 9 aa, synthetic construct
  source 1..9: note = Seed: VVVGAGDVG (KRAS G13D)
WVVYANDVS

SEQ ID NO: 96389 - protein, 9 aa, synthetic construct
  source 1..9: note = Seed: VVVGAGDVG (KRAS G13D)
WVVYANDVV

SEQ ID NO: 96390 - protein, 9 aa, synthetic construct
  source 1..9: note = Seed: VVVGAGDVG (KRAS G13D)
WVVYANDVW

SEQ ID NO: 96391 - protein, 9 aa, synthetic construct
  source 1..9: note = Seed: VVVGAGDVG (KRAS G13D)
WVVYANDVY

SEQ ID NO: 96392 - protein, 9 aa, synthetic construct
  source 1..9: note = Seed: VVVGAGDVG (KRAS G13D)
WVVYAPDVA

SEQ ID NO: 96393 - protein, 9 aa, synthetic construct
  source 1..9: note = Seed: VVVGAGDVG (KRAS G13D)
WVVYAPDVI

SEQ ID NO: 96394 - protein, 9 aa, synthetic construct
  source 1..9: note = Seed: VVVGAGDVG (KRAS G13D)
WVVYAPDVL

SEQ ID NO: 96395 - protein, 9 aa, synthetic construct
  source 1..9: note = Seed: VVVGAGDVG (KRAS G13D)
WVVYAPDVM

SEQ ID NO: 96396 - protein, 9 aa, synthetic construct
  source 1..9: note = Seed: VVVGAGDVG (KRAS G13D)
WVVYAPDVV

SEQ ID NO: 96397 - protein, 9 aa, synthetic construct
  source 1..9: note = Seed: VVVGAGDVG (KRAS G13D)
WVVYASDVA

SEQ ID NO: 96398 - protein, 9 aa, synthetic construct
  source 1..9: note = Seed: VVVGAGDVG (KRAS G13D)
WVVYASDVF

SEQ ID NO: 96399 - protein, 9 aa, synthetic construct
  source 1..9: note = Seed: VVVGAGDVG (KRAS G13D)
WVVYASDVI

SEQ ID NO: 96400 - protein, 9 aa, synthetic construct
  source 1..9: note = Seed: VVVGAGDVG (KRAS G13D)
WVVYASDVL

SEQ ID NO: 96401 - protein, 9 aa, synthetic construct
  source 1..9: note = Seed: VVVGAGDVG (KRAS G13D)
WVVYASDVM

SEQ ID NO: 96402 - protein, 9 aa, synthetic construct
  source 1..9: note = Seed: VVVGAGDVG (KRAS G13D)
WVVYASDVS

SEQ ID NO: 96403 - protein, 9 aa, synthetic construct
  source 1..9: note = Seed: VVVGAGDVG (KRAS G13D)
WVVYASDVV

SEQ ID NO: 96404 - protein, 9 aa, synthetic construct
  source 1..9: note = Seed: VVVGAGDVG (KRAS G13D)
WVVYASDVY

SEQ ID NO: 96405 - protein, 9 aa, synthetic construct
  source 1..9: note = Seed: VVVGAGDVG (KRAS G13D)
WVVYATDVA

SEQ ID NO: 96406 - protein, 9 aa, synthetic construct
  source 1..9: note = Seed: VVVGAGDVG (KRAS G13D)
WVVYAVDVA

SEQ ID NO: 96407 - protein, 9 aa, synthetic construct
  source 1..9: note = Seed: VVVGAGDVG (KRAS G13D)
WVVYAVDVM

SEQ ID NO: 96408 - protein, 9 aa, synthetic construct
  source 1..9: note = Seed: VVVGAGDVG (KRAS G13D)
WVVYAVDVQ

SEQ ID NO: 96409 - protein, 9 aa, synthetic construct
  source 1..9: note = Seed: VVVGAGDVG (KRAS G13D)
WVVYAVDVS

SEQ ID NO: 96410 - protein, 9 aa, synthetic construct
  source 1..9: note = Seed: VVVGAGDVG (KRAS G13D)
WVVYAVDVV

SEQ ID NO: 96411 - protein, 9 aa, synthetic construct
  source 1..9: note = Seed: VVVGAGDVG (KRAS G13D)
WVVYAVDVY

SEQ ID NO: 96412 - protein, 9 aa, synthetic construct
  source 1..9: note = Seed: VVVGAGDVG (KRAS G13D)
YVVAAADVA

SEQ ID NO: 96413 - protein, 9 aa, synthetic construct
  source 1..9: note = Seed: VVVGAGDVG (KRAS G13D)
YVVAAADVC

SEQ ID NO: 96414 - protein, 9 aa, synthetic construct
  source 1..9: note = Seed: VVVGAGDVG (KRAS G13D)
YVVAAADVD

SEQ ID NO: 96415 - protein, 9 aa, synthetic construct
  source 1..9: note = Seed: VVVGAGDVG (KRAS G13D)
YVVAAADVE

SEQ ID NO: 96416 - protein, 9 aa, synthetic construct
  source 1..9: note = Seed: VVVGAGDVG (KRAS G13D)
YVVAAADVF

SEQ ID NO: 96417 - protein, 9 aa, synthetic construct
  source 1..9: note = Seed: VVVGAGDVG (KRAS G13D)
YVVAAADVG

SEQ ID NO: 96418 - protein, 9 aa, synthetic construct
  source 1..9: note = Seed: VVVGAGDVG (KRAS G13D)
YVVAAADVH

SEQ ID NO: 96419 - protein, 9 aa, synthetic construct
  source 1..9: note = Seed: VVVGAGDVG (KRAS G13D)
YVVAAADVI

SEQ ID NO: 96420 - protein, 9 aa, synthetic construct
  source 1..9: note = Seed: VVVGAGDVG (KRAS G13D)
YVVAAADVK

SEQ ID NO: 96421 - protein, 9 aa, synthetic construct
  source 1..9: note = Seed: VVVGAGDVG (KRAS G13D)
YVVAAADVL

SEQ ID NO: 96422 - protein, 9 aa, synthetic construct
  source 1..9: note = Seed: VVVGAGDVG (KRAS G13D)
YVVAAADVM

SEQ ID NO: 96423 - protein, 9 aa, synthetic construct
  source 1..9: note = Seed: VVVGAGDVG (KRAS G13D)
YVVAAADVN

SEQ ID NO: 96424 - protein, 9 aa, synthetic construct
  source 1..9: note = Seed: VVVGAGDVG (KRAS G13D)
YVVAAADVP

SEQ ID NO: 96425 - protein, 9 aa, synthetic construct
  source 1..9: note = Seed: VVVGAGDVG (KRAS G13D)
YVVAAADVQ

SEQ ID NO: 96426 - protein, 9 aa, synthetic construct
  source 1..9: note = Seed: VVVGAGDVG (KRAS G13D)
YVVAAADVR

SEQ ID NO: 96427 - protein, 9 aa, synthetic construct
  source 1..9: note = Seed: VVVGAGDVG (KRAS G13D)
YVVAAADVS

SEQ ID NO: 96428 - protein, 9 aa, synthetic construct
  source 1..9: note = Seed: VVVGAGDVG (KRAS G13D)
YVVAAADVT

SEQ ID NO: 96429 - protein, 9 aa, synthetic construct
  source 1..9: note = Seed: VVVGAGDVG (KRAS G13D)
YVVAAADVV

SEQ ID NO: 96430 - protein, 9 aa, synthetic construct
  source 1..9: note = Seed: VVVGAGDVG (KRAS G13D)
YVVAAADVW

SEQ ID NO: 96431 - protein, 9 aa, synthetic construct
  source 1..9: note = Seed: VVVGAGDVG (KRAS G13D)
YVVAAADVY

SEQ ID NO: 96432 - protein, 9 aa, synthetic construct
  source 1..9: note = Seed: VVVGAGDVG (KRAS G13D)
YVVAACDVA

SEQ ID NO: 96433 - protein, 9 aa, synthetic construct
  source 1..9: note = Seed: VVVGAGDVG (KRAS G13D)
YVVAACDVH

SEQ ID NO: 96434 - protein, 9 aa, synthetic construct
  source 1..9: note = Seed: VVVGAGDVG (KRAS G13D)
YVVAACDVL

SEQ ID NO: 96435 - protein, 9 aa, synthetic construct
  source 1..9: note = Seed: VVVGAGDVG (KRAS G13D)
YVVAACDVM

SEQ ID NO: 96436 - protein, 9 aa, synthetic construct
  source 1..9: note = Seed: VVVGAGDVG (KRAS G13D)
YVVAACDVN

SEQ ID NO: 96437 - protein, 9 aa, synthetic construct
  source 1..9: note = Seed: VVVGAGDVG (KRAS G13D)
YVVAACDVQ

SEQ ID NO: 96438 - protein, 9 aa, synthetic construct
  source 1..9: note = Seed: VVVGAGDVG (KRAS G13D)
YVVAACDVS

SEQ ID NO: 96439 - protein, 9 aa, synthetic construct
  source 1..9: note = Seed: VVVGAGDVG (KRAS G13D)
YVVAACDVV

SEQ ID NO: 96440 - protein, 9 aa, synthetic construct
  source 1..9: note = Seed: VVVGAGDVG (KRAS G13D)
YVVAADDVA

SEQ ID NO: 96441 - protein, 9 aa, synthetic construct
  source 1..9: note = Seed: VVVGAGDVG (KRAS G13D)
YVVAADDVF

SEQ ID NO: 96442 - protein, 9 aa, synthetic construct
  source 1..9: note = Seed: VVVGAGDVG (KRAS G13D)
YVVAADDVG

SEQ ID NO: 96443 - protein, 9 aa, synthetic construct
  source 1..9: note = Seed: VVVGAGDVG (KRAS G13D)
YVVAADDVI

SEQ ID NO: 96444 - protein, 9 aa, synthetic construct
  source 1..9: note = Seed: VVVGAGDVG (KRAS G13D)
YVVAADDVL

SEQ ID NO: 96445 - protein, 9 aa, synthetic construct
  source 1..9: note = Seed: VVVGAGDVG (KRAS G13D)
YVVAADDVM

SEQ ID NO: 96446 - protein, 9 aa, synthetic construct
  source 1..9: note = Seed: VVVGAGDVG (KRAS G13D)
YVVAADDVN

SEQ ID NO: 96447 - protein, 9 aa, synthetic construct
  source 1..9: note = Seed: VVVGAGDVG (KRAS G13D)
YVVAADDVS

SEQ ID NO: 96448 - protein, 9 aa, synthetic construct
  source 1..9: note = Seed: VVVGAGDVG (KRAS G13D)
YVVAADDVT

SEQ ID NO: 96449 - protein, 9 aa, synthetic construct
  source 1..9: note = Seed: VVVGAGDVG (KRAS G13D)
YVVAADDVV

SEQ ID NO: 96450 - protein, 9 aa, synthetic construct
  source 1..9: note = Seed: VVVGAGDVG (KRAS G13D)
YVVAAEDVA

SEQ ID NO: 96451 - protein, 9 aa, synthetic construct
  source 1..9: note = Seed: VVVGAGDVG (KRAS G13D)
YVVAAEDVF

SEQ ID NO: 96452 - protein, 9 aa, synthetic construct
  source 1..9: note = Seed: VVVGAGDVG (KRAS G13D)
YVVAAEDVG

SEQ ID NO: 96453 - protein, 9 aa, synthetic construct
  source 1..9: note = Seed: VVVGAGDVG (KRAS G13D)
YVVAAEDVH

SEQ ID NO: 96454 - protein, 9 aa, synthetic construct
  source 1..9: note = Seed: VVVGAGDVG (KRAS G13D)
YVVAAEDVI

SEQ ID NO: 96455 - protein, 9 aa, synthetic construct
  source 1..9: note = Seed: VVVGAGDVG (KRAS G13D)
YVVAAEDVL

SEQ ID NO: 96456 - protein, 9 aa, synthetic construct
  source 1..9: note = Seed: VVVGAGDVG (KRAS G13D)
YVVAAEDVM

SEQ ID NO: 96457 - protein, 9 aa, synthetic construct
  source 1..9: note = Seed: VVVGAGDVG (KRAS G13D)
YVVAAEDVN

SEQ ID NO: 96458 - protein, 9 aa, synthetic construct
  source 1..9: note = Seed: VVVGAGDVG (KRAS G13D)
YVVAAEDVP

SEQ ID NO: 96459 - protein, 9 aa, synthetic construct
  source 1..9: note = Seed: VVVGAGDVG (KRAS G13D)
YVVAAEDVQ

SEQ ID NO: 96460 - protein, 9 aa, synthetic construct
  source 1..9: note = Seed: VVVGAGDVG (KRAS G13D)
YVVAAEDVS

SEQ ID NO: 96461 - protein, 9 aa, synthetic construct
  source 1..9: note = Seed: VVVGAGDVG (KRAS G13D)
YVVAAEDVT

SEQ ID NO: 96462 - protein, 9 aa, synthetic construct
  source 1..9: note = Seed: VVVGAGDVG (KRAS G13D)
YVVAAEDVV

SEQ ID NO: 96463 - protein, 9 aa, synthetic construct
  source 1..9: note = Seed: VVVGAGDVG (KRAS G13D)
YVVAAEDVY

SEQ ID NO: 96464 - protein, 9 aa, synthetic construct
  source 1..9: note = Seed: VVVGAGDVG (KRAS G13D)
YVVAAFDVA

SEQ ID NO: 96465 - protein, 9 aa, synthetic construct
  source 1..9: note = Seed: VVVGAGDVG (KRAS G13D)
YVVAAFDVH

SEQ ID NO: 96466 - protein, 9 aa, synthetic construct
  source 1..9: note = Seed: VVVGAGDVG (KRAS G13D)
YVVAAFDVM

SEQ ID NO: 96467 - protein, 9 aa, synthetic construct
  source 1..9: note = Seed: VVVGAGDVG (KRAS G13D)
YVVAAFDVN

SEQ ID NO: 96468 - protein, 9 aa, synthetic construct
  source 1..9: note = Seed: VVVGAGDVG (KRAS G13D)
YVVAAFDVS

SEQ ID NO: 96469 - protein, 9 aa, synthetic construct
  source 1..9: note = Seed: VVVGAGDVG (KRAS G13D)
YVVAAFDVT

SEQ ID NO: 96470 - protein, 9 aa, synthetic construct
  source 1..9: note = Seed: VVVGAGDVG (KRAS G13D)
YVVAAGDVA

SEQ ID NO: 96471 - protein, 9 aa, synthetic construct
  source 1..9: note = Seed: VVVGAGDVG (KRAS G13D)
YVVAAGDVC

SEQ ID NO: 96472 - protein, 9 aa, synthetic construct
  source 1..9: note = Seed: VVVGAGDVG (KRAS G13D)
YVVAAGDVD

SEQ ID NO: 96473 - protein, 9 aa, synthetic construct
  source 1..9: note = Seed: VVVGAGDVG (KRAS G13D)
YVVAAGDVE

SEQ ID NO: 96474 - protein, 9 aa, synthetic construct
  source 1..9: note = Seed: VVVGAGDVG (KRAS G13D)
YVVAAGDVF

SEQ ID NO: 96475 - protein, 9 aa, synthetic construct
  source 1..9: note = Seed: VVVGAGDVG (KRAS G13D)
YVVAAGDVG

SEQ ID NO: 96476 - protein, 9 aa, synthetic construct
  source 1..9: note = Seed: VVVGAGDVG (KRAS G13D)
YVVAAGDVH

SEQ ID NO: 96477 - protein, 9 aa, synthetic construct
  source 1..9: note = Seed: VVVGAGDVG (KRAS G13D)
YVVAAGDVI

SEQ ID NO: 96478 - protein, 9 aa, synthetic construct
  source 1..9: note = Seed: VVVGAGDVG (KRAS G13D)
YVVAAGDVK

SEQ ID NO: 96479 - protein, 9 aa, synthetic construct
  source 1..9: note = Seed: VVVGAGDVG (KRAS G13D)
YVVAAGDVL

SEQ ID NO: 96480 - protein, 9 aa, synthetic construct
  source 1..9: note = Seed: VVVGAGDVG (KRAS G13D)
YVVAAGDVM

SEQ ID NO: 96481 - protein, 9 aa, synthetic construct
  source 1..9: note = Seed: VVVGAGDVG (KRAS G13D)
YVVAAGDVN

SEQ ID NO: 96482 - protein, 9 aa, synthetic construct
  source 1..9: note = Seed: VVVGAGDVG (KRAS G13D)
YVVAAGDVP

SEQ ID NO: 96483 - protein, 9 aa, synthetic construct
  source 1..9: note = Seed: VVVGAGDVG (KRAS G13D)
YVVAAGDVQ

SEQ ID NO: 96484 - protein, 9 aa, synthetic construct
  source 1..9: note = Seed: VVVGAGDVG (KRAS G13D)
YVVAAGDVR

SEQ ID NO: 96485 - protein, 9 aa, synthetic construct
  source 1..9: note = Seed: VVVGAGDVG (KRAS G13D)
YVVAAGDVS

SEQ ID NO: 96486 - protein, 9 aa, synthetic construct
  source 1..9: note = Seed: VVVGAGDVG (KRAS G13D)
YVVAAGDVT

SEQ ID NO: 96487 - protein, 9 aa, synthetic construct
  source 1..9: note = Seed: VVVGAGDVG (KRAS G13D)
YVVAAGDVV

SEQ ID NO: 96488 - protein, 9 aa, synthetic construct
  source 1..9: note = Seed: VVVGAGDVG (KRAS G13D)
YVVAAGDVW

SEQ ID NO: 96489 - protein, 9 aa, synthetic construct
  source 1..9: note = Seed: VVVGAGDVG (KRAS G13D)
YVVAAGDVY

SEQ ID NO: 96490 - protein, 9 aa, synthetic construct
  source 1..9: note = Seed: VVVGAGDVG (KRAS G13D)
YVVAAHDVA

SEQ ID NO: 96491 - protein, 9 aa, synthetic construct
  source 1..9: note = Seed: VVVGAGDVG (KRAS G13D)
YVVAAHDVC

SEQ ID NO: 96492 - protein, 9 aa, synthetic construct
  source 1..9: note = Seed: VVVGAGDVG (KRAS G13D)
YVVAAHDVD

SEQ ID NO: 96493 - protein, 9 aa, synthetic construct
  source 1..9: note = Seed: VVVGAGDVG (KRAS G13D)
YVVAAHDVE

SEQ ID NO: 96494 - protein, 9 aa, synthetic construct
  source 1..9: note = Seed: VVVGAGDVG (KRAS G13D)
YVVAAHDVF

SEQ ID NO: 96495 - protein, 9 aa, synthetic construct
  source 1..9: note = Seed: VVVGAGDVG (KRAS G13D)
YVVAAHDVG

SEQ ID NO: 96496 - protein, 9 aa, synthetic construct
  source 1..9: note = Seed: VVVGAGDVG (KRAS G13D)
YVVAAHDVH

SEQ ID NO: 96497 - protein, 9 aa, synthetic construct
  source 1..9: note = Seed: VVVGAGDVG (KRAS G13D)
YVVAAHDVI

SEQ ID NO: 96498 - protein, 9 aa, synthetic construct
  source 1..9: note = Seed: VVVGAGDVG (KRAS G13D)
YVVAAHDVL

SEQ ID NO: 96499 - protein, 9 aa, synthetic construct
  source 1..9: note = Seed: VVVGAGDVG (KRAS G13D)
YVVAAHDVM

SEQ ID NO: 96500 - protein, 9 aa, synthetic construct
  source 1..9: note = Seed: VVVGAGDVG (KRAS G13D)
YVVAAHDVN

SEQ ID NO: 96501 - protein, 9 aa, synthetic construct
  source 1..9: note = Seed: VVVGAGDVG (KRAS G13D)
YVVAAHDVQ

SEQ ID NO: 96502 - protein, 9 aa, synthetic construct
  source 1..9: note = Seed: VVVGAGDVG (KRAS G13D)
YVVAAHDVS

SEQ ID NO: 96503 - protein, 9 aa, synthetic construct
  source 1..9: note = Seed: VVVGAGDVG (KRAS G13D)
YVVAAHDVT

SEQ ID NO: 96504 - protein, 9 aa, synthetic construct
  source 1..9: note = Seed: VVVGAGDVG (KRAS G13D)
YVVAAHDVV

SEQ ID NO: 96505 - protein, 9 aa, synthetic construct
  source 1..9: note = Seed: VVVGAGDVG (KRAS G13D)
YVVAAHDVY

SEQ ID NO: 96506 - protein, 9 aa, synthetic construct
  source 1..9: note = Seed: VVVGAGDVG (KRAS G13D)
YVVAAIDVA

SEQ ID NO: 96507 - protein, 9 aa, synthetic construct
  source 1..9: note = Seed: VVVGAGDVG (KRAS G13D)
YVVAAIDVC

SEQ ID NO: 96508 - protein, 9 aa, synthetic construct
  source 1..9: note = Seed: VVVGAGDVG (KRAS G13D)
YVVAAIDVD

SEQ ID NO: 96509 - protein, 9 aa, synthetic construct
  source 1..9: note = Seed: VVVGAGDVG (KRAS G13D)
YVVAAIDVE

SEQ ID NO: 96510 - protein, 9 aa, synthetic construct
  source 1..9: note = Seed: VVVGAGDVG (KRAS G13D)
YVVAAIDVF

SEQ ID NO: 96511 - protein, 9 aa, synthetic construct
  source 1..9: note = Seed: VVVGAGDVG (KRAS G13D)
YVVAAIDVG

SEQ ID NO: 96512 - protein, 9 aa, synthetic construct
  source 1..9: note = Seed: VVVGAGDVG (KRAS G13D)
YVVAAIDVH

SEQ ID NO: 96513 - protein, 9 aa, synthetic construct
  source 1..9: note = Seed: VVVGAGDVG (KRAS G13D)
YVVAAIDVI

SEQ ID NO: 96514 - protein, 9 aa, synthetic construct
  source 1..9: note = Seed: VVVGAGDVG (KRAS G13D)
YVVAAIDVK

SEQ ID NO: 96515 - protein, 9 aa, synthetic construct
  source 1..9: note = Seed: VVVGAGDVG (KRAS G13D)
YVVAAIDVL

SEQ ID NO: 96516 - protein, 9 aa, synthetic construct
  source 1..9: note = Seed: VVVGAGDVG (KRAS G13D)
YVVAAIDVM

SEQ ID NO: 96517 - protein, 9 aa, synthetic construct
  source 1..9: note = Seed: VVVGAGDVG (KRAS G13D)
YVVAAIDVN

SEQ ID NO: 96518 - protein, 9 aa, synthetic construct
  source 1..9: note = Seed: VVVGAGDVG (KRAS G13D)
YVVAAIDVP

SEQ ID NO: 96519 - protein, 9 aa, synthetic construct
  source 1..9: note = Seed: VVVGAGDVG (KRAS G13D)
YVVAAIDVQ

SEQ ID NO: 96520 - protein, 9 aa, synthetic construct
  source 1..9: note = Seed: VVVGAGDVG (KRAS G13D)
YVVAAIDVR

SEQ ID NO: 96521 - protein, 9 aa, synthetic construct
  source 1..9: note = Seed: VVVGAGDVG (KRAS G13D)
YVVAAIDVS

SEQ ID NO: 96522 - protein, 9 aa, synthetic construct
  source 1..9: note = Seed: VVVGAGDVG (KRAS G13D)
YVVAAIDVT

SEQ ID NO: 96523 - protein, 9 aa, synthetic construct
  source 1..9: note = Seed: VVVGAGDVG (KRAS G13D)
YVVAAIDVV

SEQ ID NO: 96524 - protein, 9 aa, synthetic construct
  source 1..9: note = Seed: VVVGAGDVG (KRAS G13D)
YVVAAIDVY

SEQ ID NO: 96525 - protein, 9 aa, synthetic construct
  source 1..9: note = Seed: VVVGAGDVG (KRAS G13D)
YVVAAKDVA

SEQ ID NO: 96526 - protein, 9 aa, synthetic construct
  source 1..9: note = Seed: VVVGAGDVG (KRAS G13D)
YVVAAKDVH

SEQ ID NO: 96527 - protein, 9 aa, synthetic construct
  source 1..9: note = Seed: VVVGAGDVG (KRAS G13D)
YVVAAKDVI

SEQ ID NO: 96528 - protein, 9 aa, synthetic construct
  source 1..9: note = Seed: VVVGAGDVG (KRAS G13D)
YVVAAKDVL

SEQ ID NO: 96529 - protein, 9 aa, synthetic construct
  source 1..9: note = Seed: VVVGAGDVG (KRAS G13D)
YVVAAKDVM

SEQ ID NO: 96530 - protein, 9 aa, synthetic construct
  source 1..9: note = Seed: VVVGAGDVG (KRAS G13D)
YVVAAKDVN

SEQ ID NO: 96531 - protein, 9 aa, synthetic construct
  source 1..9: note = Seed: VVVGAGDVG (KRAS G13D)
YVVAAKDVS

SEQ ID NO: 96532 - protein, 9 aa, synthetic construct
  source 1..9: note = Seed: VVVGAGDVG (KRAS G13D)
YVVAAKDVT

SEQ ID NO: 96533 - protein, 9 aa, synthetic construct
  source 1..9: note = Seed: VVVGAGDVG (KRAS G13D)
YVVAAKDVV

SEQ ID NO: 96534 - protein, 9 aa, synthetic construct
  source 1..9: note = Seed: VVVGAGDVG (KRAS G13D)
YVVAAKDVY

SEQ ID NO: 96535 - protein, 9 aa, synthetic construct
  source 1..9: note = Seed: VVVGAGDVG (KRAS G13D)
YVVAALDVA

SEQ ID NO: 96536 - protein, 9 aa, synthetic construct
  source 1..9: note = Seed: VVVGAGDVG (KRAS G13D)
YVVAALDVC

SEQ ID NO: 96537 - protein, 9 aa, synthetic construct
  source 1..9: note = Seed: VVVGAGDVG (KRAS G13D)
YVVAALDVD

SEQ ID NO: 96538 - protein, 9 aa, synthetic construct
  source 1..9: note = Seed: VVVGAGDVG (KRAS G13D)
YVVAALDVG

SEQ ID NO: 96539 - protein, 9 aa, synthetic construct
  source 1..9: note = Seed: VVVGAGDVG (KRAS G13D)
YVVAALDVM

SEQ ID NO: 96540 - protein, 9 aa, synthetic construct
  source 1..9: note = Seed: VVVGAGDVG (KRAS G13D)
YVVAALDVN

SEQ ID NO: 96541 - protein, 9 aa, synthetic construct
  source 1..9: note = Seed: VVVGAGDVG (KRAS G13D)
YVVAALDVS

SEQ ID NO: 96542 - protein, 9 aa, synthetic construct
  source 1..9: note = Seed: VVVGAGDVG (KRAS G13D)
YVVAALDVT

SEQ ID NO: 96543 - protein, 9 aa, synthetic construct
  source 1..9: note = Seed: VVVGAGDVG (KRAS G13D)
YVVAAMDVC

SEQ ID NO: 96544 - protein, 9 aa, synthetic construct
  source 1..9: note = Seed: VVVGAGDVG (KRAS G13D)
YVVAAMDVD

SEQ ID NO: 96545 - protein, 9 aa, synthetic construct
  source 1..9: note = Seed: VVVGAGDVG (KRAS G13D)
YVVAAMDVG

SEQ ID NO: 96546 - protein, 9 aa, synthetic construct
  source 1..9: note = Seed: VVVGAGDVG (KRAS G13D)
YVVAAMDVN

SEQ ID NO: 96547 - protein, 9 aa, synthetic construct
  source 1..9: note = Seed: VVVGAGDVG (KRAS G13D)
YVVAAMDVS

SEQ ID NO: 96548 - protein, 9 aa, synthetic construct
  source 1..9: note = Seed: VVVGAGDVG (KRAS G13D)
YVVAAMDVT

SEQ ID NO: 96549 - protein, 9 aa, synthetic construct
  source 1..9: note = Seed: VVVGAGDVG (KRAS G13D)
YVVAANDVA

SEQ ID NO: 96550 - protein, 9 aa, synthetic construct
  source 1..9: note = Seed: VVVGAGDVG (KRAS G13D)
YVVAANDVC

SEQ ID NO: 96551 - protein, 9 aa, synthetic construct
  source 1..9: note = Seed: VVVGAGDVG (KRAS G13D)
YVVAANDVD

SEQ ID NO: 96552 - protein, 9 aa, synthetic construct
  source 1..9: note = Seed: VVVGAGDVG (KRAS G13D)
YVVAANDVE

SEQ ID NO: 96553 - protein, 9 aa, synthetic construct
  source 1..9: note = Seed: VVVGAGDVG (KRAS G13D)
YVVAANDVF

SEQ ID NO: 96554 - protein, 9 aa, synthetic construct
  source 1..9: note = Seed: VVVGAGDVG (KRAS G13D)
YVVAANDVG

SEQ ID NO: 96555 - protein, 9 aa, synthetic construct
  source 1..9: note = Seed: VVVGAGDVG (KRAS G13D)
YVVAANDVH

SEQ ID NO: 96556 - protein, 9 aa, synthetic construct
  source 1..9: note = Seed: VVVGAGDVG (KRAS G13D)
YVVAANDVI

SEQ ID NO: 96557 - protein, 9 aa, synthetic construct
  source 1..9: note = Seed: VVVGAGDVG (KRAS G13D)
YVVAANDVK

SEQ ID NO: 96558 - protein, 9 aa, synthetic construct
  source 1..9: note = Seed: VVVGAGDVG (KRAS G13D)
YVVAANDVL

SEQ ID NO: 96559 - protein, 9 aa, synthetic construct
  source 1..9: note = Seed: VVVGAGDVG (KRAS G13D)
YVVAANDVM

SEQ ID NO: 96560 - protein, 9 aa, synthetic construct
  source 1..9: note = Seed: VVVGAGDVG (KRAS G13D)
YVVAANDVN

SEQ ID NO: 96561 - protein, 9 aa, synthetic construct
  source 1..9: note = Seed: VVVGAGDVG (KRAS G13D)
YVVAANDVP

SEQ ID NO: 96562 - protein, 9 aa, synthetic construct
  source 1..9: note = Seed: VVVGAGDVG (KRAS G13D)
YVVAANDVQ

SEQ ID NO: 96563 - protein, 9 aa, synthetic construct
  source 1..9: note = Seed: VVVGAGDVG (KRAS G13D)
YVVAANDVR

SEQ ID NO: 96564 - protein, 9 aa, synthetic construct
  source 1..9: note = Seed: VVVGAGDVG (KRAS G13D)
YVVAANDVS

SEQ ID NO: 96565 - protein, 9 aa, synthetic construct
  source 1..9: note = Seed: VVVGAGDVG (KRAS G13D)
YVVAANDVT

SEQ ID NO: 96566 - protein, 9 aa, synthetic construct
  source 1..9: note = Seed: VVVGAGDVG (KRAS G13D)
YVVAANDVV

SEQ ID NO: 96567 - protein, 9 aa, synthetic construct
  source 1..9: note = Seed: VVVGAGDVG (KRAS G13D)
YVVAANDVW

SEQ ID NO: 96568 - protein, 9 aa, synthetic construct
  source 1..9: note = Seed: VVVGAGDVG (KRAS G13D)
YVVAANDVY

SEQ ID NO: 96569 - protein, 9 aa, synthetic construct
  source 1..9: note = Seed: VVVGAGDVG (KRAS G13D)
YVVAAPDVA

SEQ ID NO: 96570 - protein, 9 aa, synthetic construct
  source 1..9: note = Seed: VVVGAGDVG (KRAS G13D)
YVVAAPDVC

SEQ ID NO: 96571 - protein, 9 aa, synthetic construct
  source 1..9: note = Seed: VVVGAGDVG (KRAS G13D)
YVVAAPDVD

SEQ ID NO: 96572 - protein, 9 aa, synthetic construct
  source 1..9: note = Seed: VVVGAGDVG (KRAS G13D)
YVVAAPDVE

SEQ ID NO: 96573 - protein, 9 aa, synthetic construct
  source 1..9: note = Seed: VVVGAGDVG (KRAS G13D)
YVVAAPDVF

SEQ ID NO: 96574 - protein, 9 aa, synthetic construct
  source 1..9: note = Seed: VVVGAGDVG (KRAS G13D)
YVVAAPDVG

SEQ ID NO: 96575 - protein, 9 aa, synthetic construct
  source 1..9: note = Seed: VVVGAGDVG (KRAS G13D)
YVVAAPDVH

SEQ ID NO: 96576 - protein, 9 aa, synthetic construct
  source 1..9: note = Seed: VVVGAGDVG (KRAS G13D)
YVVAAPDVI

SEQ ID NO: 96577 - protein, 9 aa, synthetic construct
  source 1..9: note = Seed: VVVGAGDVG (KRAS G13D)
YVVAAPDVK

SEQ ID NO: 96578 - protein, 9 aa, synthetic construct
  source 1..9: note = Seed: VVVGAGDVG (KRAS G13D)
YVVAAPDVL

SEQ ID NO: 96579 - protein, 9 aa, synthetic construct
  source 1..9: note = Seed: VVVGAGDVG (KRAS G13D)
YVVAAPDVM

SEQ ID NO: 96580 - protein, 9 aa, synthetic construct
  source 1..9: note = Seed: VVVGAGDVG (KRAS G13D)
YVVAAPDVN

SEQ ID NO: 96581 - protein, 9 aa, synthetic construct
  source 1..9: note = Seed: VVVGAGDVG (KRAS G13D)
YVVAAPDVP

SEQ ID NO: 96582 - protein, 9 aa, synthetic construct
  source 1..9: note = Seed: VVVGAGDVG (KRAS G13D)
YVVAAPDVQ

SEQ ID NO: 96583 - protein, 9 aa, synthetic construct
  source 1..9: note = Seed: VVVGAGDVG (KRAS G13D)
YVVAAPDVR

SEQ ID NO: 96584 - protein, 9 aa, synthetic construct
  source 1..9: note = Seed: VVVGAGDVG (KRAS G13D)
YVVAAPDVS

SEQ ID NO: 96585 - protein, 9 aa, synthetic construct
  source 1..9: note = Seed: VVVGAGDVG (KRAS G13D)
YVVAAPDVT

SEQ ID NO: 96586 - protein, 9 aa, synthetic construct
  source 1..9: note = Seed: VVVGAGDVG (KRAS G13D)
YVVAAPDVV

SEQ ID NO: 96587 - protein, 9 aa, synthetic construct
  source 1..9: note = Seed: VVVGAGDVG (KRAS G13D)
YVVAAPDVW

SEQ ID NO: 96588 - protein, 9 aa, synthetic construct
  source 1..9: note = Seed: VVVGAGDVG (KRAS G13D)
YVVAAPDVY

SEQ ID NO: 96589 - protein, 9 aa, synthetic construct
  source 1..9: note = Seed: VVVGAGDVG (KRAS G13D)
YVVAAQDVA

SEQ ID NO: 96590 - protein, 9 aa, synthetic construct
  source 1..9: note = Seed: VVVGAGDVG (KRAS G13D)
YVVAAQDVC

SEQ ID NO: 96591 - protein, 9 aa, synthetic construct
  source 1..9: note = Seed: VVVGAGDVG (KRAS G13D)
YVVAAQDVD

SEQ ID NO: 96592 - protein, 9 aa, synthetic construct
  source 1..9: note = Seed: VVVGAGDVG (KRAS G13D)
YVVAAQDVE

SEQ ID NO: 96593 - protein, 9 aa, synthetic construct
  source 1..9: note = Seed: VVVGAGDVG (KRAS G13D)
YVVAAQDVG

SEQ ID NO: 96594 - protein, 9 aa, synthetic construct
  source 1..9: note = Seed: VVVGAGDVG (KRAS G13D)
YVVAAQDVH

SEQ ID NO: 96595 - protein, 9 aa, synthetic construct
  source 1..9: note = Seed: VVVGAGDVG (KRAS G13D)
YVVAAQDVI

SEQ ID NO: 96596 - protein, 9 aa, synthetic construct
  source 1..9: note = Seed: VVVGAGDVG (KRAS G13D)
YVVAAQDVL

SEQ ID NO: 96597 - protein, 9 aa, synthetic construct
  source 1..9: note = Seed: VVVGAGDVG (KRAS G13D)
YVVAAQDVM

SEQ ID NO: 96598 - protein, 9 aa, synthetic construct
  source 1..9: note = Seed: VVVGAGDVG (KRAS G13D)
YVVAAQDVN

SEQ ID NO: 96599 - protein, 9 aa, synthetic construct
  source 1..9: note = Seed: VVVGAGDVG (KRAS G13D)
YVVAAQDVQ

SEQ ID NO: 96600 - protein, 9 aa, synthetic construct
  source 1..9: note = Seed: VVVGAGDVG (KRAS G13D)
YVVAAQDVS

SEQ ID NO: 96601 - protein, 9 aa, synthetic construct
  source 1..9: note = Seed: VVVGAGDVG (KRAS G13D)
YVVAAQDVT

SEQ ID NO: 96602 - protein, 9 aa, synthetic construct
  source 1..9: note = Seed: VVVGAGDVG (KRAS G13D)
YVVAAQDVV

SEQ ID NO: 96603 - protein, 9 aa, synthetic construct
  source 1..9: note = Seed: VVVGAGDVG (KRAS G13D)
YVVAARDVA

SEQ ID NO: 96604 - protein, 9 aa, synthetic construct
  source 1..9: note = Seed: VVVGAGDVG (KRAS G13D)
YVVAARDVD

SEQ ID NO: 96605 - protein, 9 aa, synthetic construct
  source 1..9: note = Seed: VVVGAGDVG (KRAS G13D)
YVVAARDVE

SEQ ID NO: 96606 - protein, 9 aa, synthetic construct
  source 1..9: note = Seed: VVVGAGDVG (KRAS G13D)
YVVAARDVG

SEQ ID NO: 96607 - protein, 9 aa, synthetic construct
  source 1..9: note = Seed: VVVGAGDVG (KRAS G13D)
YVVAARDVI

SEQ ID NO: 96608 - protein, 9 aa, synthetic construct
  source 1..9: note = Seed: VVVGAGDVG (KRAS G13D)
YVVAARDVL

SEQ ID NO: 96609 - protein, 9 aa, synthetic construct
  source 1..9: note = Seed: VVVGAGDVG (KRAS G13D)
YVVAARDVM

SEQ ID NO: 96610 - protein, 9 aa, synthetic construct
  source 1..9: note = Seed: VVVGAGDVG (KRAS G13D)
YVVAARDVN

SEQ ID NO: 96611 - protein, 9 aa, synthetic construct
  source 1..9: note = Seed: VVVGAGDVG (KRAS G13D)
YVVAARDVQ

SEQ ID NO: 96612 - protein, 9 aa, synthetic construct
  source 1..9: note = Seed: VVVGAGDVG (KRAS G13D)
YVVAARDVS

SEQ ID NO: 96613 - protein, 9 aa, synthetic construct
  source 1..9: note = Seed: VVVGAGDVG (KRAS G13D)
YVVAARDVT

SEQ ID NO: 96614 - protein, 9 aa, synthetic construct
  source 1..9: note = Seed: VVVGAGDVG (KRAS G13D)
YVVAARDVV

SEQ ID NO: 96615 - protein, 9 aa, synthetic construct
  source 1..9: note = Seed: VVVGAGDVG (KRAS G13D)
YVVAASDVA

SEQ ID NO: 96616 - protein, 9 aa, synthetic construct
  source 1..9: note = Seed: VVVGAGDVG (KRAS G13D)
YVVAASDVC

SEQ ID NO: 96617 - protein, 9 aa, synthetic construct
  source 1..9: note = Seed: VVVGAGDVG (KRAS G13D)
YVVAASDVD

SEQ ID NO: 96618 - protein, 9 aa, synthetic construct
  source 1..9: note = Seed: VVVGAGDVG (KRAS G13D)
YVVAASDVE

SEQ ID NO: 96619 - protein, 9 aa, synthetic construct
  source 1..9: note = Seed: VVVGAGDVG (KRAS G13D)
YVVAASDVF

SEQ ID NO: 96620 - protein, 9 aa, synthetic construct
  source 1..9: note = Seed: VVVGAGDVG (KRAS G13D)
YVVAASDVG

SEQ ID NO: 96621 - protein, 9 aa, synthetic construct
  source 1..9: note = Seed: VVVGAGDVG (KRAS G13D)
YVVAASDVH

SEQ ID NO: 96622 - protein, 9 aa, synthetic construct
  source 1..9: note = Seed: VVVGAGDVG (KRAS G13D)
YVVAASDVI

SEQ ID NO: 96623 - protein, 9 aa, synthetic construct
  source 1..9: note = Seed: VVVGAGDVG (KRAS G13D)
YVVAASDVK

SEQ ID NO: 96624 - protein, 9 aa, synthetic construct
  source 1..9: note = Seed: VVVGAGDVG (KRAS G13D)
YVVAASDVL

SEQ ID NO: 96625 - protein, 9 aa, synthetic construct
  source 1..9: note = Seed: VVVGAGDVG (KRAS G13D)
YVVAASDVM

SEQ ID NO: 96626 - protein, 9 aa, synthetic construct
  source 1..9: note = Seed: VVVGAGDVG (KRAS G13D)
YVVAASDVN

SEQ ID NO: 96627 - protein, 9 aa, synthetic construct
  source 1..9: note = Seed: VVVGAGDVG (KRAS G13D)
YVVAASDVP

SEQ ID NO: 96628 - protein, 9 aa, synthetic construct
  source 1..9: note = Seed: VVVGAGDVG (KRAS G13D)
YVVAASDVQ

SEQ ID NO: 96629 - protein, 9 aa, synthetic construct
  source 1..9: note = Seed: VVVGAGDVG (KRAS G13D)
YVVAASDVR

SEQ ID NO: 96630 - protein, 9 aa, synthetic construct
  source 1..9: note = Seed: VVVGAGDVG (KRAS G13D)
YVVAASDVS

SEQ ID NO: 96631 - protein, 9 aa, synthetic construct
  source 1..9: note = Seed: VVVGAGDVG (KRAS G13D)
YVVAASDVT

SEQ ID NO: 96632 - protein, 9 aa, synthetic construct
  source 1..9: note = Seed: VVVGAGDVG (KRAS G13D)
YVVAASDVV

SEQ ID NO: 96633 - protein, 9 aa, synthetic construct
  source 1..9: note = Seed: VVVGAGDVG (KRAS G13D)
YVVAASDVW

SEQ ID NO: 96634 - protein, 9 aa, synthetic construct
  source 1..9: note = Seed: VVVGAGDVG (KRAS G13D)
YVVAASDVY

SEQ ID NO: 96635 - protein, 9 aa, synthetic construct
  source 1..9: note = Seed: VVVGAGDVG (KRAS G13D)
YVVAATDVA

SEQ ID NO: 96636 - protein, 9 aa, synthetic construct
  source 1..9: note = Seed: VVVGAGDVG (KRAS G13D)
YVVAATDVC

SEQ ID NO: 96637 - protein, 9 aa, synthetic construct
  source 1..9: note = Seed: VVVGAGDVG (KRAS G13D)
YVVAATDVD

SEQ ID NO: 96638 - protein, 9 aa, synthetic construct
  source 1..9: note = Seed: VVVGAGDVG (KRAS G13D)
YVVAATDVE

SEQ ID NO: 96639 - protein, 9 aa, synthetic construct
  source 1..9: note = Seed: VVVGAGDVG (KRAS G13D)
YVVAATDVF

SEQ ID NO: 96640 - protein, 9 aa, synthetic construct
  source 1..9: note = Seed: VVVGAGDVG (KRAS G13D)
YVVAATDVG

SEQ ID NO: 96641 - protein, 9 aa, synthetic construct
  source 1..9: note = Seed: VVVGAGDVG (KRAS G13D)
YVVAATDVH

SEQ ID NO: 96642 - protein, 9 aa, synthetic construct
  source 1..9: note = Seed: VVVGAGDVG (KRAS G13D)
YVVAATDVI

SEQ ID NO: 96643 - protein, 9 aa, synthetic construct
  source 1..9: note = Seed: VVVGAGDVG (KRAS G13D)
YVVAATDVK

SEQ ID NO: 96644 - protein, 9 aa, synthetic construct
  source 1..9: note = Seed: VVVGAGDVG (KRAS G13D)
YVVAATDVL

SEQ ID NO: 96645 - protein, 9 aa, synthetic construct
  source 1..9: note = Seed: VVVGAGDVG (KRAS G13D)
YVVAATDVM

SEQ ID NO: 96646 - protein, 9 aa, synthetic construct
  source 1..9: note = Seed: VVVGAGDVG (KRAS G13D)
YVVAATDVN

SEQ ID NO: 96647 - protein, 9 aa, synthetic construct
  source 1..9: note = Seed: VVVGAGDVG (KRAS G13D)
YVVAATDVP

SEQ ID NO: 96648 - protein, 9 aa, synthetic construct
  source 1..9: note = Seed: VVVGAGDVG (KRAS G13D)
YVVAATDVQ

SEQ ID NO: 96649 - protein, 9 aa, synthetic construct
  source 1..9: note = Seed: VVVGAGDVG (KRAS G13D)
YVVAATDVR

SEQ ID NO: 96650 - protein, 9 aa, synthetic construct
  source 1..9: note = Seed: VVVGAGDVG (KRAS G13D)
YVVAATDVS

SEQ ID NO: 96651 - protein, 9 aa, synthetic construct
  source 1..9: note = Seed: VVVGAGDVG (KRAS G13D)
YVVAATDVT

SEQ ID NO: 96652 - protein, 9 aa, synthetic construct
  source 1..9: note = Seed: VVVGAGDVG (KRAS G13D)
YVVAATDVV

SEQ ID NO: 96653 - protein, 9 aa, synthetic construct
  source 1..9: note = Seed: VVVGAGDVG (KRAS G13D)
YVVAATDVW

SEQ ID NO: 96654 - protein, 9 aa, synthetic construct
  source 1..9: note = Seed: VVVGAGDVG (KRAS G13D)
YVVAATDVY

SEQ ID NO: 96655 - protein, 9 aa, synthetic construct
  source 1..9: note = Seed: VVVGAGDVG (KRAS G13D)
YVVAAVDVA

SEQ ID NO: 96656 - protein, 9 aa, synthetic construct
  source 1..9: note = Seed: VVVGAGDVG (KRAS G13D)
YVVAAVDVC

SEQ ID NO: 96657 - protein, 9 aa, synthetic construct
  source 1..9: note = Seed: VVVGAGDVG (KRAS G13D)
YVVAAVDVD

SEQ ID NO: 96658 - protein, 9 aa, synthetic construct
  source 1..9: note = Seed: VVVGAGDVG (KRAS G13D)
YVVAAVDVE

SEQ ID NO: 96659 - protein, 9 aa, synthetic construct
  source 1..9: note = Seed: VVVGAGDVG (KRAS G13D)
YVVAAVDVF

SEQ ID NO: 96660 - protein, 9 aa, synthetic construct
  source 1..9: note = Seed: VVVGAGDVG (KRAS G13D)
YVVAAVDVG

SEQ ID NO: 96661 - protein, 9 aa, synthetic construct
  source 1..9: note = Seed: VVVGAGDVG (KRAS G13D)
YVVAAVDVH

SEQ ID NO: 96662 - protein, 9 aa, synthetic construct
  source 1..9: note = Seed: VVVGAGDVG (KRAS G13D)
YVVAAVDVI

SEQ ID NO: 96663 - protein, 9 aa, synthetic construct
  source 1..9: note = Seed: VVVGAGDVG (KRAS G13D)
YVVAAVDVK

SEQ ID NO: 96664 - protein, 9 aa, synthetic construct
  source 1..9: note = Seed: VVVGAGDVG (KRAS G13D)
YVVAAVDVL

SEQ ID NO: 96665 - protein, 9 aa, synthetic construct
  source 1..9: note = Seed: VVVGAGDVG (KRAS G13D)
YVVAAVDVM

SEQ ID NO: 96666 - protein, 9 aa, synthetic construct
  source 1..9: note = Seed: VVVGAGDVG (KRAS G13D)
YVVAAVDVN

SEQ ID NO: 96667 - protein, 9 aa, synthetic construct
  source 1..9: note = Seed: VVVGAGDVG (KRAS G13D)
YVVAAVDVP

SEQ ID NO: 96668 - protein, 9 aa, synthetic construct
  source 1..9: note = Seed: VVVGAGDVG (KRAS G13D)
YVVAAVDVQ

SEQ ID NO: 96669 - protein, 9 aa, synthetic construct
  source 1..9: note = Seed: VVVGAGDVG (KRAS G13D)
YVVAAVDVR

SEQ ID NO: 96670 - protein, 9 aa, synthetic construct
  source 1..9: note = Seed: VVVGAGDVG (KRAS G13D)
YVVAAVDVS

SEQ ID NO: 96671 - protein, 9 aa, synthetic construct
  source 1..9: note = Seed: VVVGAGDVG (KRAS G13D)
YVVAAVDVT

SEQ ID NO: 96672 - protein, 9 aa, synthetic construct
  source 1..9: note = Seed: VVVGAGDVG (KRAS G13D)
YVVAAVDVV

SEQ ID NO: 96673 - protein, 9 aa, synthetic construct
  source 1..9: note = Seed: VVVGAGDVG (KRAS G13D)
YVVAAVDVW

SEQ ID NO: 96674 - protein, 9 aa, synthetic construct
  source 1..9: note = Seed: VVVGAGDVG (KRAS G13D)
YVVAAVDVY

SEQ ID NO: 96675 - protein, 9 aa, synthetic construct
  source 1..9: note = Seed: VVVGAGDVG (KRAS G13D)
YVVAAWDVA

SEQ ID NO: 96676 - protein, 9 aa, synthetic construct
  source 1..9: note = Seed: VVVGAGDVG (KRAS G13D)
YVVAAWDVM

SEQ ID NO: 96677 - protein, 9 aa, synthetic construct
  source 1..9: note = Seed: VVVGAGDVG (KRAS G13D)
YVVAAWDVN

SEQ ID NO: 96678 - protein, 9 aa, synthetic construct
  source 1..9: note = Seed: VVVGAGDVG (KRAS G13D)
YVVAAWDVS

SEQ ID NO: 96679 - protein, 9 aa, synthetic construct
  source 1..9: note = Seed: VVVGAGDVG (KRAS G13D)
YVVAAYDVA

SEQ ID NO: 96680 - protein, 9 aa, synthetic construct
  source 1..9: note = Seed: VVVGAGDVG (KRAS G13D)
YVVAAYDVH

SEQ ID NO: 96681 - protein, 9 aa, synthetic construct
  source 1..9: note = Seed: VVVGAGDVG (KRAS G13D)
YVVAAYDVI

SEQ ID NO: 96682 - protein, 9 aa, synthetic construct
  source 1..9: note = Seed: VVVGAGDVG (KRAS G13D)
YVVAAYDVL

SEQ ID NO: 96683 - protein, 9 aa, synthetic construct
  source 1..9: note = Seed: VVVGAGDVG (KRAS G13D)
YVVAAYDVM

SEQ ID NO: 96684 - protein, 9 aa, synthetic construct
  source 1..9: note = Seed: VVVGAGDVG (KRAS G13D)
YVVAAYDVN

SEQ ID NO: 96685 - protein, 9 aa, synthetic construct
  source 1..9: note = Seed: VVVGAGDVG (KRAS G13D)
YVVAAYDVQ

SEQ ID NO: 96686 - protein, 9 aa, synthetic construct
  source 1..9: note = Seed: VVVGAGDVG (KRAS G13D)
YVVAAYDVS

SEQ ID NO: 96687 - protein, 9 aa, synthetic construct
  source 1..9: note = Seed: VVVGAGDVG (KRAS G13D)
YVVAAYDVT

SEQ ID NO: 96688 - protein, 9 aa, synthetic construct
  source 1..9: note = Seed: VVVGAGDVG (KRAS G13D)
YVVAAYDVV

SEQ ID NO: 96689 - protein, 9 aa, synthetic construct
  source 1..9: note = Seed: VVVGAGDVG (KRAS G13D)
YVVCAADVA

SEQ ID NO: 96690 - protein, 9 aa, synthetic construct
  source 1..9: note = Seed: VVVGAGDVG (KRAS G13D)
YVVCAADVF

SEQ ID NO: 96691 - protein, 9 aa, synthetic construct
  source 1..9: note = Seed: VVVGAGDVG (KRAS G13D)
YVVCAADVG

SEQ ID NO: 96692 - protein, 9 aa, synthetic construct
  source 1..9: note = Seed: VVVGAGDVG (KRAS G13D)
YVVCAADVH

SEQ ID NO: 96693 - protein, 9 aa, synthetic construct
  source 1..9: note = Seed: VVVGAGDVG (KRAS G13D)
YVVCAADVI

SEQ ID NO: 96694 - protein, 9 aa, synthetic construct
  source 1..9: note = Seed: VVVGAGDVG (KRAS G13D)
YVVCAADVL

SEQ ID NO: 96695 - protein, 9 aa, synthetic construct
  source 1..9: note = Seed: VVVGAGDVG (KRAS G13D)
YVVCAADVM

SEQ ID NO: 96696 - protein, 9 aa, synthetic construct
  source 1..9: note = Seed: VVVGAGDVG (KRAS G13D)
YVVCAADVN

SEQ ID NO: 96697 - protein, 9 aa, synthetic construct
  source 1..9: note = Seed: VVVGAGDVG (KRAS G13D)
YVVCAADVP

SEQ ID NO: 96698 - protein, 9 aa, synthetic construct
  source 1..9: note = Seed: VVVGAGDVG (KRAS G13D)
YVVCAADVQ

SEQ ID NO: 96699 - protein, 9 aa, synthetic construct
  source 1..9: note = Seed: VVVGAGDVG (KRAS G13D)
YVVCAADVR

SEQ ID NO: 96700 - protein, 9 aa, synthetic construct
  source 1..9: note = Seed: VVVGAGDVG (KRAS G13D)
YVVCAADVS

SEQ ID NO: 96701 - protein, 9 aa, synthetic construct
  source 1..9: note = Seed: VVVGAGDVG (KRAS G13D)
YVVCAADVT

SEQ ID NO: 96702 - protein, 9 aa, synthetic construct
  source 1..9: note = Seed: VVVGAGDVG (KRAS G13D)
YVVCAADVV

SEQ ID NO: 96703 - protein, 9 aa, synthetic construct
  source 1..9: note = Seed: VVVGAGDVG (KRAS G13D)
YVVCAADVY

SEQ ID NO: 96704 - protein, 9 aa, synthetic construct
  source 1..9: note = Seed: VVVGAGDVG (KRAS G13D)
YVVCAGDVA

SEQ ID NO: 96705 - protein, 9 aa, synthetic construct
  source 1..9: note = Seed: VVVGAGDVG (KRAS G13D)
YVVCAIDVA

SEQ ID NO: 96706 - protein, 9 aa, synthetic construct
  source 1..9: note = Seed: VVVGAGDVG (KRAS G13D)
YVVCAIDVH

SEQ ID NO: 96707 - protein, 9 aa, synthetic construct
  source 1..9: note = Seed: VVVGAGDVG (KRAS G13D)
YVVCAIDVN

SEQ ID NO: 96708 - protein, 9 aa, synthetic construct
  source 1..9: note = Seed: VVVGAGDVG (KRAS G13D)
YVVCAIDVS

SEQ ID NO: 96709 - protein, 9 aa, synthetic construct
  source 1..9: note = Seed: VVVGAGDVG (KRAS G13D)
YVVCAIDVV

SEQ ID NO: 96710 - protein, 9 aa, synthetic construct
  source 1..9: note = Seed: VVVGAGDVG (KRAS G13D)
YVVCALDVA

SEQ ID NO: 96711 - protein, 9 aa, synthetic construct
  source 1..9: note = Seed: VVVGAGDVG (KRAS G13D)
YVVCALDVL

SEQ ID NO: 96712 - protein, 9 aa, synthetic construct
  source 1..9: note = Seed: VVVGAGDVG (KRAS G13D)
YVVCALDVN

SEQ ID NO: 96713 - protein, 9 aa, synthetic construct
  source 1..9: note = Seed: VVVGAGDVG (KRAS G13D)
YVVCALDVQ

SEQ ID NO: 96714 - protein, 9 aa, synthetic construct
  source 1..9: note = Seed: VVVGAGDVG (KRAS G13D)
YVVCALDVS

SEQ ID NO: 96715 - protein, 9 aa, synthetic construct
  source 1..9: note = Seed: VVVGAGDVG (KRAS G13D)
YVVCALDVV

SEQ ID NO: 96716 - protein, 9 aa, synthetic construct
  source 1..9: note = Seed: VVVGAGDVG (KRAS G13D)
YVVCAMDVA

SEQ ID NO: 96717 - protein, 9 aa, synthetic construct
  source 1..9: note = Seed: VVVGAGDVG (KRAS G13D)
YVVCAMDVI

SEQ ID NO: 96718 - protein, 9 aa, synthetic construct
  source 1..9: note = Seed: VVVGAGDVG (KRAS G13D)
YVVCAMDVL

SEQ ID NO: 96719 - protein, 9 aa, synthetic construct
  source 1..9: note = Seed: VVVGAGDVG (KRAS G13D)
YVVCAMDVM

SEQ ID NO: 96720 - protein, 9 aa, synthetic construct
  source 1..9: note = Seed: VVVGAGDVG (KRAS G13D)
YVVCAMDVN

SEQ ID NO: 96721 - protein, 9 aa, synthetic construct
  source 1..9: note = Seed: VVVGAGDVG (KRAS G13D)
YVVCAMDVQ

SEQ ID NO: 96722 - protein, 9 aa, synthetic construct
  source 1..9: note = Seed: VVVGAGDVG (KRAS G13D)
YVVCAMDVS

SEQ ID NO: 96723 - protein, 9 aa, synthetic construct
  source 1..9: note = Seed: VVVGAGDVG (KRAS G13D)
YVVCAMDVV

SEQ ID NO: 96724 - protein, 9 aa, synthetic construct
  source 1..9: note = Seed: VVVGAGDVG (KRAS G13D)
YVVCANDVA

SEQ ID NO: 96725 - protein, 9 aa, synthetic construct
  source 1..9: note = Seed: VVVGAGDVG (KRAS G13D)
YVVCANDVG

SEQ ID NO: 96726 - protein, 9 aa, synthetic construct
  source 1..9: note = Seed: VVVGAGDVG (KRAS G13D)
YVVCANDVH

SEQ ID NO: 96727 - protein, 9 aa, synthetic construct
  source 1..9: note = Seed: VVVGAGDVG (KRAS G13D)
YVVCANDVI

SEQ ID NO: 96728 - protein, 9 aa, synthetic construct
  source 1..9: note = Seed: VVVGAGDVG (KRAS G13D)
YVVCANDVK

SEQ ID NO: 96729 - protein, 9 aa, synthetic construct
  source 1..9: note = Seed: VVVGAGDVG (KRAS G13D)
YVVCANDVL

SEQ ID NO: 96730 - protein, 9 aa, synthetic construct
  source 1..9: note = Seed: VVVGAGDVG (KRAS G13D)
YVVCANDVM

SEQ ID NO: 96731 - protein, 9 aa, synthetic construct
  source 1..9: note = Seed: VVVGAGDVG (KRAS G13D)
YVVCANDVN

SEQ ID NO: 96732 - protein, 9 aa, synthetic construct
  source 1..9: note = Seed: VVVGAGDVG (KRAS G13D)
YVVCANDVQ

SEQ ID NO: 96733 - protein, 9 aa, synthetic construct
  source 1..9: note = Seed: VVVGAGDVG (KRAS G13D)
YVVCANDVR

SEQ ID NO: 96734 - protein, 9 aa, synthetic construct
  source 1..9: note = Seed: VVVGAGDVG (KRAS G13D)
YVVCANDVS

SEQ ID NO: 96735 - protein, 9 aa, synthetic construct
  source 1..9: note = Seed: VVVGAGDVG (KRAS G13D)
YVVCANDVT

SEQ ID NO: 96736 - protein, 9 aa, synthetic construct
  source 1..9: note = Seed: VVVGAGDVG (KRAS G13D)
YVVCANDVV

SEQ ID NO: 96737 - protein, 9 aa, synthetic construct
  source 1..9: note = Seed: VVVGAGDVG (KRAS G13D)
YVVCANDVY

SEQ ID NO: 96738 - protein, 9 aa, synthetic construct
  source 1..9: note = Seed: VVVGAGDVG (KRAS G13D)
YVVCAPDVA

SEQ ID NO: 96739 - protein, 9 aa, synthetic construct
  source 1..9: note = Seed: VVVGAGDVG (KRAS G13D)
YVVCAPDVF

SEQ ID NO: 96740 - protein, 9 aa, synthetic construct
  source 1..9: note = Seed: VVVGAGDVG (KRAS G13D)
YVVCAPDVI

SEQ ID NO: 96741 - protein, 9 aa, synthetic construct
  source 1..9: note = Seed: VVVGAGDVG (KRAS G13D)
YVVCAPDVL

SEQ ID NO: 96742 - protein, 9 aa, synthetic construct
  source 1..9: note = Seed: VVVGAGDVG (KRAS G13D)
YVVCAPDVM

SEQ ID NO: 96743 - protein, 9 aa, synthetic construct
  source 1..9: note = Seed: VVVGAGDVG (KRAS G13D)
YVVCAPDVN

SEQ ID NO: 96744 - protein, 9 aa, synthetic construct
  source 1..9: note = Seed: VVVGAGDVG (KRAS G13D)
YVVCAPDVS

SEQ ID NO: 96745 - protein, 9 aa, synthetic construct
  source 1..9: note = Seed: VVVGAGDVG (KRAS G13D)
YVVCAPDVT

SEQ ID NO: 96746 - protein, 9 aa, synthetic construct
  source 1..9: note = Seed: VVVGAGDVG (KRAS G13D)
YVVCAPDVV

SEQ ID NO: 96747 - protein, 9 aa, synthetic construct
  source 1..9: note = Seed: VVVGAGDVG (KRAS G13D)
YVVCAPDVY

SEQ ID NO: 96748 - protein, 9 aa, synthetic construct
  source 1..9: note = Seed: VVVGAGDVG (KRAS G13D)
YVVCASDVA

SEQ ID NO: 96749 - protein, 9 aa, synthetic construct
  source 1..9: note = Seed: VVVGAGDVG (KRAS G13D)
YVVCASDVI

SEQ ID NO: 96750 - protein, 9 aa, synthetic construct
  source 1..9: note = Seed: VVVGAGDVG (KRAS G13D)
YVVCASDVL

SEQ ID NO: 96751 - protein, 9 aa, synthetic construct
  source 1..9: note = Seed: VVVGAGDVG (KRAS G13D)
YVVCASDVM

SEQ ID NO: 96752 - protein, 9 aa, synthetic construct
  source 1..9: note = Seed: VVVGAGDVG (KRAS G13D)
YVVCASDVN

SEQ ID NO: 96753 - protein, 9 aa, synthetic construct
  source 1..9: note = Seed: VVVGAGDVG (KRAS G13D)
YVVCASDVS

SEQ ID NO: 96754 - protein, 9 aa, synthetic construct
  source 1..9: note = Seed: VVVGAGDVG (KRAS G13D)
YVVCASDVT

SEQ ID NO: 96755 - protein, 9 aa, synthetic construct
  source 1..9: note = Seed: VVVGAGDVG (KRAS G13D)
YVVCASDVV

SEQ ID NO: 96756 - protein, 9 aa, synthetic construct
  source 1..9: note = Seed: VVVGAGDVG (KRAS G13D)
YVVCATDVA

SEQ ID NO: 96757 - protein, 9 aa, synthetic construct
  source 1..9: note = Seed: VVVGAGDVG (KRAS G13D)
YVVCATDVI

SEQ ID NO: 96758 - protein, 9 aa, synthetic construct
  source 1..9: note = Seed: VVVGAGDVG (KRAS G13D)
YVVCATDVL

SEQ ID NO: 96759 - protein, 9 aa, synthetic construct
  source 1..9: note = Seed: VVVGAGDVG (KRAS G13D)
YVVCATDVM

SEQ ID NO: 96760 - protein, 9 aa, synthetic construct
  source 1..9: note = Seed: VVVGAGDVG (KRAS G13D)
YVVCATDVN

SEQ ID NO: 96761 - protein, 9 aa, synthetic construct
  source 1..9: note = Seed: VVVGAGDVG (KRAS G13D)
YVVCATDVS

SEQ ID NO: 96762 - protein, 9 aa, synthetic construct
  source 1..9: note = Seed: VVVGAGDVG (KRAS G13D)
YVVCATDVT

SEQ ID NO: 96763 - protein, 9 aa, synthetic construct
  source 1..9: note = Seed: VVVGAGDVG (KRAS G13D)
YVVCATDVV

SEQ ID NO: 96764 - protein, 9 aa, synthetic construct
  source 1..9: note = Seed: VVVGAGDVG (KRAS G13D)
YVVCAVDVA

SEQ ID NO: 96765 - protein, 9 aa, synthetic construct
  source 1..9: note = Seed: VVVGAGDVG (KRAS G13D)
YVVCAVDVH

SEQ ID NO: 96766 - protein, 9 aa, synthetic construct
  source 1..9: note = Seed: VVVGAGDVG (KRAS G13D)
YVVCAVDVN

SEQ ID NO: 96767 - protein, 9 aa, synthetic construct
  source 1..9: note = Seed: VVVGAGDVG (KRAS G13D)
YVVCAVDVS

SEQ ID NO: 96768 - protein, 9 aa, synthetic construct
  source 1..9: note = Seed: VVVGAGDVG (KRAS G13D)
YVVCAVDVV

SEQ ID NO: 96769 - protein, 9 aa, synthetic construct
  source 1..9: note = Seed: VVVGAGDVG (KRAS G13D)
YVVDAADVA

SEQ ID NO: 96770 - protein, 9 aa, synthetic construct
  source 1..9: note = Seed: VVVGAGDVG (KRAS G13D)
YVVDAADVF

SEQ ID NO: 96771 - protein, 9 aa, synthetic construct
  source 1..9: note = Seed: VVVGAGDVG (KRAS G13D)
YVVDAADVH

SEQ ID NO: 96772 - protein, 9 aa, synthetic construct
  source 1..9: note = Seed: VVVGAGDVG (KRAS G13D)
YVVDAADVI

SEQ ID NO: 96773 - protein, 9 aa, synthetic construct
  source 1..9: note = Seed: VVVGAGDVG (KRAS G13D)
YVVDAADVL

SEQ ID NO: 96774 - protein, 9 aa, synthetic construct
  source 1..9: note = Seed: VVVGAGDVG (KRAS G13D)
YVVDAADVM

SEQ ID NO: 96775 - protein, 9 aa, synthetic construct
  source 1..9: note = Seed: VVVGAGDVG (KRAS G13D)
YVVDAADVN

SEQ ID NO: 96776 - protein, 9 aa, synthetic construct
  source 1..9: note = Seed: VVVGAGDVG (KRAS G13D)
YVVDAADVQ

SEQ ID NO: 96777 - protein, 9 aa, synthetic construct
  source 1..9: note = Seed: VVVGAGDVG (KRAS G13D)
YVVDAADVS

SEQ ID NO: 96778 - protein, 9 aa, synthetic construct
  source 1..9: note = Seed: VVVGAGDVG (KRAS G13D)
YVVDAADVT

SEQ ID NO: 96779 - protein, 9 aa, synthetic construct
  source 1..9: note = Seed: VVVGAGDVG (KRAS G13D)
YVVDAADVV

SEQ ID NO: 96780 - protein, 9 aa, synthetic construct
  source 1..9: note = Seed: VVVGAGDVG (KRAS G13D)
YVVDAADVY

SEQ ID NO: 96781 - protein, 9 aa, synthetic construct
  source 1..9: note = Seed: VVVGAGDVG (KRAS G13D)
YVVDAIDVA

SEQ ID NO: 96782 - protein, 9 aa, synthetic construct
  source 1..9: note = Seed: VVVGAGDVG (KRAS G13D)
YVVDAIDVI

SEQ ID NO: 96783 - protein, 9 aa, synthetic construct
  source 1..9: note = Seed: VVVGAGDVG (KRAS G13D)
YVVDAIDVM

SEQ ID NO: 96784 - protein, 9 aa, synthetic construct
  source 1..9: note = Seed: VVVGAGDVG (KRAS G13D)
YVVDAIDVV

SEQ ID NO: 96785 - protein, 9 aa, synthetic construct
  source 1..9: note = Seed: VVVGAGDVG (KRAS G13D)
YVVDALDVA

SEQ ID NO: 96786 - protein, 9 aa, synthetic construct
  source 1..9: note = Seed: VVVGAGDVG (KRAS G13D)
YVVDALDVM

SEQ ID NO: 96787 - protein, 9 aa, synthetic construct
  source 1..9: note = Seed: VVVGAGDVG (KRAS G13D)
YVVDALDVS

SEQ ID NO: 96788 - protein, 9 aa, synthetic construct
  source 1..9: note = Seed: VVVGAGDVG (KRAS G13D)
YVVDALDVY

SEQ ID NO: 96789 - protein, 9 aa, synthetic construct
  source 1..9: note = Seed: VVVGAGDVG (KRAS G13D)
YVVDAMDVA

SEQ ID NO: 96790 - protein, 9 aa, synthetic construct
  source 1..9: note = Seed: VVVGAGDVG (KRAS G13D)
YVVDANDVA

SEQ ID NO: 96791 - protein, 9 aa, synthetic construct
  source 1..9: note = Seed: VVVGAGDVG (KRAS G13D)
YVVDANDVG

SEQ ID NO: 96792 - protein, 9 aa, synthetic construct
  source 1..9: note = Seed: VVVGAGDVG (KRAS G13D)
YVVDANDVS

SEQ ID NO: 96793 - protein, 9 aa, synthetic construct
  source 1..9: note = Seed: VVVGAGDVG (KRAS G13D)
YVVDANDVT

SEQ ID NO: 96794 - protein, 9 aa, synthetic construct
  source 1..9: note = Seed: VVVGAGDVG (KRAS G13D)
YVVDANDVV

SEQ ID NO: 96795 - protein, 9 aa, synthetic construct
  source 1..9: note = Seed: VVVGAGDVG (KRAS G13D)
YVVDASDVA

SEQ ID NO: 96796 - protein, 9 aa, synthetic construct
  source 1..9: note = Seed: VVVGAGDVG (KRAS G13D)
YVVDASDVS

SEQ ID NO: 96797 - protein, 9 aa, synthetic construct
  source 1..9: note = Seed: VVVGAGDVG (KRAS G13D)
YVVDATDVA

SEQ ID NO: 96798 - protein, 9 aa, synthetic construct
  source 1..9: note = Seed: VVVGAGDVG (KRAS G13D)
YVVDATDVS

SEQ ID NO: 96799 - protein, 9 aa, synthetic construct
  source 1..9: note = Seed: VVVGAGDVG (KRAS G13D)
YVVDAVDVA

SEQ ID NO: 96800 - protein, 9 aa, synthetic construct
  source 1..9: note = Seed: VVVGAGDVG (KRAS G13D)
YVVDAVDVI

SEQ ID NO: 96801 - protein, 9 aa, synthetic construct
  source 1..9: note = Seed: VVVGAGDVG (KRAS G13D)
YVVDAVDVL

SEQ ID NO: 96802 - protein, 9 aa, synthetic construct
  source 1..9: note = Seed: VVVGAGDVG (KRAS G13D)
YVVDAVDVM

SEQ ID NO: 96803 - protein, 9 aa, synthetic construct
  source 1..9: note = Seed: VVVGAGDVG (KRAS G13D)
YVVDAVDVV

SEQ ID NO: 96804 - protein, 9 aa, synthetic construct
  source 1..9: note = Seed: VVVGAGDVG (KRAS G13D)
YVVEAADVA

SEQ ID NO: 96805 - protein, 9 aa, synthetic construct
  source 1..9: note = Seed: VVVGAGDVG (KRAS G13D)
YVVEAADVE

SEQ ID NO: 96806 - protein, 9 aa, synthetic construct
  source 1..9: note = Seed: VVVGAGDVG (KRAS G13D)
YVVEAADVF

SEQ ID NO: 96807 - protein, 9 aa, synthetic construct
  source 1..9: note = Seed: VVVGAGDVG (KRAS G13D)
YVVEAADVG

SEQ ID NO: 96808 - protein, 9 aa, synthetic construct
  source 1..9: note = Seed: VVVGAGDVG (KRAS G13D)
YVVEAADVH

SEQ ID NO: 96809 - protein, 9 aa, synthetic construct
  source 1..9: note = Seed: VVVGAGDVG (KRAS G13D)
YVVEAADVI

SEQ ID NO: 96810 - protein, 9 aa, synthetic construct
  source 1..9: note = Seed: VVVGAGDVG (KRAS G13D)
YVVEAADVK

SEQ ID NO: 96811 - protein, 9 aa, synthetic construct
  source 1..9: note = Seed: VVVGAGDVG (KRAS G13D)
YVVEAADVL

SEQ ID NO: 96812 - protein, 9 aa, synthetic construct
  source 1..9: note = Seed: VVVGAGDVG (KRAS G13D)
YVVEAADVM

SEQ ID NO: 96813 - protein, 9 aa, synthetic construct
  source 1..9: note = Seed: VVVGAGDVG (KRAS G13D)
YVVEAADVN

SEQ ID NO: 96814 - protein, 9 aa, synthetic construct
  source 1..9: note = Seed: VVVGAGDVG (KRAS G13D)
YVVEAADVP

SEQ ID NO: 96815 - protein, 9 aa, synthetic construct
  source 1..9: note = Seed: VVVGAGDVG (KRAS G13D)
YVVEAADVQ

SEQ ID NO: 96816 - protein, 9 aa, synthetic construct
  source 1..9: note = Seed: VVVGAGDVG (KRAS G13D)
YVVEAADVR

SEQ ID NO: 96817 - protein, 9 aa, synthetic construct
  source 1..9: note = Seed: VVVGAGDVG (KRAS G13D)
YVVEAADVS

SEQ ID NO: 96818 - protein, 9 aa, synthetic construct
  source 1..9: note = Seed: VVVGAGDVG (KRAS G13D)
YVVEAADVT

SEQ ID NO: 96819 - protein, 9 aa, synthetic construct
  source 1..9: note = Seed: VVVGAGDVG (KRAS G13D)
YVVEAADVV

SEQ ID NO: 96820 - protein, 9 aa, synthetic construct
  source 1..9: note = Seed: VVVGAGDVG (KRAS G13D)
YVVEAADVW

SEQ ID NO: 96821 - protein, 9 aa, synthetic construct
  source 1..9: note = Seed: VVVGAGDVG (KRAS G13D)
YVVEAADVY

SEQ ID NO: 96822 - protein, 9 aa, synthetic construct
  source 1..9: note = Seed: VVVGAGDVG (KRAS G13D)
YVVEAGDVA

SEQ ID NO: 96823 - protein, 9 aa, synthetic construct
  source 1..9: note = Seed: VVVGAGDVG (KRAS G13D)
YVVEAHDVA

SEQ ID NO: 96824 - protein, 9 aa, synthetic construct
  source 1..9: note = Seed: VVVGAGDVG (KRAS G13D)
YVVEAIDVA

SEQ ID NO: 96825 - protein, 9 aa, synthetic construct
  source 1..9: note = Seed: VVVGAGDVG (KRAS G13D)
YVVEAIDVG

SEQ ID NO: 96826 - protein, 9 aa, synthetic construct
  source 1..9: note = Seed: VVVGAGDVG (KRAS G13D)
YVVEAIDVH

SEQ ID NO: 96827 - protein, 9 aa, synthetic construct
  source 1..9: note = Seed: VVVGAGDVG (KRAS G13D)
YVVEAIDVI

SEQ ID NO: 96828 - protein, 9 aa, synthetic construct
  source 1..9: note = Seed: VVVGAGDVG (KRAS G13D)
YVVEAIDVL

SEQ ID NO: 96829 - protein, 9 aa, synthetic construct
  source 1..9: note = Seed: VVVGAGDVG (KRAS G13D)
YVVEAIDVM

SEQ ID NO: 96830 - protein, 9 aa, synthetic construct
  source 1..9: note = Seed: VVVGAGDVG (KRAS G13D)
YVVEAIDVN

SEQ ID NO: 96831 - protein, 9 aa, synthetic construct
  source 1..9: note = Seed: VVVGAGDVG (KRAS G13D)
YVVEAIDVQ

SEQ ID NO: 96832 - protein, 9 aa, synthetic construct
  source 1..9: note = Seed: VVVGAGDVG (KRAS G13D)
YVVEAIDVR

SEQ ID NO: 96833 - protein, 9 aa, synthetic construct
  source 1..9: note = Seed: VVVGAGDVG (KRAS G13D)
YVVEAIDVS

SEQ ID NO: 96834 - protein, 9 aa, synthetic construct
  source 1..9: note = Seed: VVVGAGDVG (KRAS G13D)
YVVEAIDVT

SEQ ID NO: 96835 - protein, 9 aa, synthetic construct
  source 1..9: note = Seed: VVVGAGDVG (KRAS G13D)
YVVEAIDVV

SEQ ID NO: 96836 - protein, 9 aa, synthetic construct
  source 1..9: note = Seed: VVVGAGDVG (KRAS G13D)
YVVEALDVG

SEQ ID NO: 96837 - protein, 9 aa, synthetic construct
  source 1..9: note = Seed: VVVGAGDVG (KRAS G13D)
YVVEALDVS

SEQ ID NO: 96838 - protein, 9 aa, synthetic construct
  source 1..9: note = Seed: VVVGAGDVG (KRAS G13D)
YVVEAMDVS

SEQ ID NO: 96839 - protein, 9 aa, synthetic construct
  source 1..9: note = Seed: VVVGAGDVG (KRAS G13D)
YVVEANDVA

SEQ ID NO: 96840 - protein, 9 aa, synthetic construct
  source 1..9: note = Seed: VVVGAGDVG (KRAS G13D)
YVVEANDVF

SEQ ID NO: 96841 - protein, 9 aa, synthetic construct
  source 1..9: note = Seed: VVVGAGDVG (KRAS G13D)
YVVEANDVG

SEQ ID NO: 96842 - protein, 9 aa, synthetic construct
  source 1..9: note = Seed: VVVGAGDVG (KRAS G13D)
YVVEANDVH

SEQ ID NO: 96843 - protein, 9 aa, synthetic construct
  source 1..9: note = Seed: VVVGAGDVG (KRAS G13D)
YVVEANDVI

SEQ ID NO: 96844 - protein, 9 aa, synthetic construct
  source 1..9: note = Seed: VVVGAGDVG (KRAS G13D)
YVVEANDVL

SEQ ID NO: 96845 - protein, 9 aa, synthetic construct
  source 1..9: note = Seed: VVVGAGDVG (KRAS G13D)
YVVEANDVM

SEQ ID NO: 96846 - protein, 9 aa, synthetic construct
  source 1..9: note = Seed: VVVGAGDVG (KRAS G13D)
YVVEANDVN

SEQ ID NO: 96847 - protein, 9 aa, synthetic construct
  source 1..9: note = Seed: VVVGAGDVG (KRAS G13D)
YVVEANDVQ

SEQ ID NO: 96848 - protein, 9 aa, synthetic construct
  source 1..9: note = Seed: VVVGAGDVG (KRAS G13D)
YVVEANDVS

SEQ ID NO: 96849 - protein, 9 aa, synthetic construct
  source 1..9: note = Seed: VVVGAGDVG (KRAS G13D)
YVVEANDVT

SEQ ID NO: 96850 - protein, 9 aa, synthetic construct
  source 1..9: note = Seed: VVVGAGDVG (KRAS G13D)
YVVEANDVV

SEQ ID NO: 96851 - protein, 9 aa, synthetic construct
  source 1..9: note = Seed: VVVGAGDVG (KRAS G13D)
YVVEANDVY

SEQ ID NO: 96852 - protein, 9 aa, synthetic construct
  source 1..9: note = Seed: VVVGAGDVG (KRAS G13D)
YVVEAPDVA

SEQ ID NO: 96853 - protein, 9 aa, synthetic construct
  source 1..9: note = Seed: VVVGAGDVG (KRAS G13D)
YVVEAPDVF

SEQ ID NO: 96854 - protein, 9 aa, synthetic construct
  source 1..9: note = Seed: VVVGAGDVG (KRAS G13D)
YVVEAPDVI

SEQ ID NO: 96855 - protein, 9 aa, synthetic construct
  source 1..9: note = Seed: VVVGAGDVG (KRAS G13D)
YVVEAPDVL

SEQ ID NO: 96856 - protein, 9 aa, synthetic construct
  source 1..9: note = Seed: VVVGAGDVG (KRAS G13D)
YVVEAPDVM

SEQ ID NO: 96857 - protein, 9 aa, synthetic construct
  source 1..9: note = Seed: VVVGAGDVG (KRAS G13D)
YVVEAPDVS

SEQ ID NO: 96858 - protein, 9 aa, synthetic construct
  source 1..9: note = Seed: VVVGAGDVG (KRAS G13D)
YVVEAPDVV

SEQ ID NO: 96859 - protein, 9 aa, synthetic construct
  source 1..9: note = Seed: VVVGAGDVG (KRAS G13D)
YVVEAPDVY

SEQ ID NO: 96860 - protein, 9 aa, synthetic construct
  source 1..9: note = Seed: VVVGAGDVG (KRAS G13D)
YVVEAQDVA

SEQ ID NO: 96861 - protein, 9 aa, synthetic construct
  source 1..9: note = Seed: VVVGAGDVG (KRAS G13D)
YVVEASDVA

SEQ ID NO: 96862 - protein, 9 aa, synthetic construct
  source 1..9: note = Seed: VVVGAGDVG (KRAS G13D)
YVVEASDVH

SEQ ID NO: 96863 - protein, 9 aa, synthetic construct
  source 1..9: note = Seed: VVVGAGDVG (KRAS G13D)
YVVEASDVI

SEQ ID NO: 96864 - protein, 9 aa, synthetic construct
  source 1..9: note = Seed: VVVGAGDVG (KRAS G13D)
YVVEASDVL

SEQ ID NO: 96865 - protein, 9 aa, synthetic construct
  source 1..9: note = Seed: VVVGAGDVG (KRAS G13D)
YVVEASDVM

SEQ ID NO: 96866 - protein, 9 aa, synthetic construct
  source 1..9: note = Seed: VVVGAGDVG (KRAS G13D)
YVVEASDVN

SEQ ID NO: 96867 - protein, 9 aa, synthetic construct
  source 1..9: note = Seed: VVVGAGDVG (KRAS G13D)
YVVEASDVQ

SEQ ID NO: 96868 - protein, 9 aa, synthetic construct
  source 1..9: note = Seed: VVVGAGDVG (KRAS G13D)
YVVEASDVS

SEQ ID NO: 96869 - protein, 9 aa, synthetic construct
  source 1..9: note = Seed: VVVGAGDVG (KRAS G13D)
YVVEASDVT

SEQ ID NO: 96870 - protein, 9 aa, synthetic construct
  source 1..9: note = Seed: VVVGAGDVG (KRAS G13D)
YVVEASDVV

SEQ ID NO: 96871 - protein, 9 aa, synthetic construct
  source 1..9: note = Seed: VVVGAGDVG (KRAS G13D)
YVVEASDVY

SEQ ID NO: 96872 - protein, 9 aa, synthetic construct
  source 1..9: note = Seed: VVVGAGDVG (KRAS G13D)
YVVEATDVA

SEQ ID NO: 96873 - protein, 9 aa, synthetic construct
  source 1..9: note = Seed: VVVGAGDVG (KRAS G13D)
YVVEATDVI

SEQ ID NO: 96874 - protein, 9 aa, synthetic construct
  source 1..9: note = Seed: VVVGAGDVG (KRAS G13D)
YVVEATDVL

SEQ ID NO: 96875 - protein, 9 aa, synthetic construct
  source 1..9: note = Seed: VVVGAGDVG (KRAS G13D)
YVVEATDVM

SEQ ID NO: 96876 - protein, 9 aa, synthetic construct
  source 1..9: note = Seed: VVVGAGDVG (KRAS G13D)
YVVEATDVN

SEQ ID NO: 96877 - protein, 9 aa, synthetic construct
  source 1..9: note = Seed: VVVGAGDVG (KRAS G13D)
YVVEATDVS

SEQ ID NO: 96878 - protein, 9 aa, synthetic construct
  source 1..9: note = Seed: VVVGAGDVG (KRAS G13D)
YVVEATDVT

SEQ ID NO: 96879 - protein, 9 aa, synthetic construct
  source 1..9: note = Seed: VVVGAGDVG (KRAS G13D)
YVVEATDVV

SEQ ID NO: 96880 - protein, 9 aa, synthetic construct
  source 1..9: note = Seed: VVVGAGDVG (KRAS G13D)
YVVEAVDVA

SEQ ID NO: 96881 - protein, 9 aa, synthetic construct
  source 1..9: note = Seed: VVVGAGDVG (KRAS G13D)
YVVEAVDVG

SEQ ID NO: 96882 - protein, 9 aa, synthetic construct
  source 1..9: note = Seed: VVVGAGDVG (KRAS G13D)
YVVEAVDVH

SEQ ID NO: 96883 - protein, 9 aa, synthetic construct
  source 1..9: note = Seed: VVVGAGDVG (KRAS G13D)
YVVEAVDVI

SEQ ID NO: 96884 - protein, 9 aa, synthetic construct
  source 1..9: note = Seed: VVVGAGDVG (KRAS G13D)
YVVEAVDVL

SEQ ID NO: 96885 - protein, 9 aa, synthetic construct
  source 1..9: note = Seed: VVVGAGDVG (KRAS G13D)
YVVEAVDVM

SEQ ID NO: 96886 - protein, 9 aa, synthetic construct
  source 1..9: note = Seed: VVVGAGDVG (KRAS G13D)
YVVEAVDVN

SEQ ID NO: 96887 - protein, 9 aa, synthetic construct
  source 1..9: note = Seed: VVVGAGDVG (KRAS G13D)
YVVEAVDVQ

SEQ ID NO: 96888 - protein, 9 aa, synthetic construct
  source 1..9: note = Seed: VVVGAGDVG (KRAS G13D)
YVVEAVDVS

SEQ ID NO: 96889 - protein, 9 aa, synthetic construct
  source 1..9: note = Seed: VVVGAGDVG (KRAS G13D)
YVVEAVDVT

SEQ ID NO: 96890 - protein, 9 aa, synthetic construct
  source 1..9: note = Seed: VVVGAGDVG (KRAS G13D)
YVVEAVDVV

SEQ ID NO: 96891 - protein, 9 aa, synthetic construct
  source 1..9: note = Seed: VVVGAGDVG (KRAS G13D)
YVVFAADVA

SEQ ID NO: 96892 - protein, 9 aa, synthetic construct
  source 1..9: note = Seed: VVVGAGDVG (KRAS G13D)
YVVFAADVC

SEQ ID NO: 96893 - protein, 9 aa, synthetic construct
  source 1..9: note = Seed: VVVGAGDVG (KRAS G13D)
YVVFAADVD

SEQ ID NO: 96894 - protein, 9 aa, synthetic construct
  source 1..9: note = Seed: VVVGAGDVG (KRAS G13D)
YVVFAADVE

SEQ ID NO: 96895 - protein, 9 aa, synthetic construct
  source 1..9: note = Seed: VVVGAGDVG (KRAS G13D)
YVVFAADVF

SEQ ID NO: 96896 - protein, 9 aa, synthetic construct
  source 1..9: note = Seed: VVVGAGDVG (KRAS G13D)
YVVFAADVG

SEQ ID NO: 96897 - protein, 9 aa, synthetic construct
  source 1..9: note = Seed: VVVGAGDVG (KRAS G13D)
YVVFAADVH

SEQ ID NO: 96898 - protein, 9 aa, synthetic construct
  source 1..9: note = Seed: VVVGAGDVG (KRAS G13D)
YVVFAADVI

SEQ ID NO: 96899 - protein, 9 aa, synthetic construct
  source 1..9: note = Seed: VVVGAGDVG (KRAS G13D)
YVVFAADVK

SEQ ID NO: 96900 - protein, 9 aa, synthetic construct
  source 1..9: note = Seed: VVVGAGDVG (KRAS G13D)
YVVFAADVL

SEQ ID NO: 96901 - protein, 9 aa, synthetic construct
  source 1..9: note = Seed: VVVGAGDVG (KRAS G13D)
YVVFAADVM

SEQ ID NO: 96902 - protein, 9 aa, synthetic construct
  source 1..9: note = Seed: VVVGAGDVG (KRAS G13D)
YVVFAADVN

SEQ ID NO: 96903 - protein, 9 aa, synthetic construct
  source 1..9: note = Seed: VVVGAGDVG (KRAS G13D)
YVVFAADVP

SEQ ID NO: 96904 - protein, 9 aa, synthetic construct
  source 1..9: note = Seed: VVVGAGDVG (KRAS G13D)
YVVFAADVQ

SEQ ID NO: 96905 - protein, 9 aa, synthetic construct
  source 1..9: note = Seed: VVVGAGDVG (KRAS G13D)
YVVFAADVR

SEQ ID NO: 96906 - protein, 9 aa, synthetic construct
  source 1..9: note = Seed: VVVGAGDVG (KRAS G13D)
YVVFAADVS

SEQ ID NO: 96907 - protein, 9 aa, synthetic construct
  source 1..9: note = Seed: VVVGAGDVG (KRAS G13D)
YVVFAADVT

SEQ ID NO: 96908 - protein, 9 aa, synthetic construct
  source 1..9: note = Seed: VVVGAGDVG (KRAS G13D)
YVVFAADVV

SEQ ID NO: 96909 - protein, 9 aa, synthetic construct
  source 1..9: note = Seed: VVVGAGDVG (KRAS G13D)
YVVFAADVY

SEQ ID NO: 96910 - protein, 9 aa, synthetic construct
  source 1..9: note = Seed: VVVGAGDVG (KRAS G13D)
YVVFADDVA

SEQ ID NO: 96911 - protein, 9 aa, synthetic construct
  source 1..9: note = Seed: VVVGAGDVG (KRAS G13D)
YVVFADDVF

SEQ ID NO: 96912 - protein, 9 aa, synthetic construct
  source 1..9: note = Seed: VVVGAGDVG (KRAS G13D)
YVVFADDVI

SEQ ID NO: 96913 - protein, 9 aa, synthetic construct
  source 1..9: note = Seed: VVVGAGDVG (KRAS G13D)
YVVFADDVL

SEQ ID NO: 96914 - protein, 9 aa, synthetic construct
  source 1..9: note = Seed: VVVGAGDVG (KRAS G13D)
YVVFADDVM

SEQ ID NO: 96915 - protein, 9 aa, synthetic construct
  source 1..9: note = Seed: VVVGAGDVG (KRAS G13D)
YVVFADDVS

SEQ ID NO: 96916 - protein, 9 aa, synthetic construct
  source 1..9: note = Seed: VVVGAGDVG (KRAS G13D)
YVVFADDVV

SEQ ID NO: 96917 - protein, 9 aa, synthetic construct
  source 1..9: note = Seed: VVVGAGDVG (KRAS G13D)
YVVFADDVY

SEQ ID NO: 96918 - protein, 9 aa, synthetic construct
  source 1..9: note = Seed: VVVGAGDVG (KRAS G13D)
YVVFAEDVA

SEQ ID NO: 96919 - protein, 9 aa, synthetic construct
  source 1..9: note = Seed: VVVGAGDVG (KRAS G13D)
YVVFAEDVH

SEQ ID NO: 96920 - protein, 9 aa, synthetic construct
  source 1..9: note = Seed: VVVGAGDVG (KRAS G13D)
YVVFAEDVN

SEQ ID NO: 96921 - protein, 9 aa, synthetic construct
  source 1..9: note = Seed: VVVGAGDVG (KRAS G13D)
YVVFAEDVS

SEQ ID NO: 96922 - protein, 9 aa, synthetic construct
  source 1..9: note = Seed: VVVGAGDVG (KRAS G13D)
YVVFAEDVV

SEQ ID NO: 96923 - protein, 9 aa, synthetic construct
  source 1..9: note = Seed: VVVGAGDVG (KRAS G13D)
YVVFAGDVA

SEQ ID NO: 96924 - protein, 9 aa, synthetic construct
  source 1..9: note = Seed: VVVGAGDVG (KRAS G13D)
YVVFAGDVG

SEQ ID NO: 96925 - protein, 9 aa, synthetic construct
  source 1..9: note = Seed: VVVGAGDVG (KRAS G13D)
YVVFAGDVH

SEQ ID NO: 96926 - protein, 9 aa, synthetic construct
  source 1..9: note = Seed: VVVGAGDVG (KRAS G13D)
YVVFAGDVI

SEQ ID NO: 96927 - protein, 9 aa, synthetic construct
  source 1..9: note = Seed: VVVGAGDVG (KRAS G13D)
YVVFAGDVL

SEQ ID NO: 96928 - protein, 9 aa, synthetic construct
  source 1..9: note = Seed: VVVGAGDVG (KRAS G13D)
YVVFAGDVM

SEQ ID NO: 96929 - protein, 9 aa, synthetic construct
  source 1..9: note = Seed: VVVGAGDVG (KRAS G13D)
YVVFAGDVN

SEQ ID NO: 96930 - protein, 9 aa, synthetic construct
  source 1..9: note = Seed: VVVGAGDVG (KRAS G13D)
YVVFAGDVP

SEQ ID NO: 96931 - protein, 9 aa, synthetic construct
  source 1..9: note = Seed: VVVGAGDVG (KRAS G13D)
YVVFAGDVQ

SEQ ID NO: 96932 - protein, 9 aa, synthetic construct
  source 1..9: note = Seed: VVVGAGDVG (KRAS G13D)
YVVFAGDVS

SEQ ID NO: 96933 - protein, 9 aa, synthetic construct
  source 1..9: note = Seed: VVVGAGDVG (KRAS G13D)
YVVFAGDVT

SEQ ID NO: 96934 - protein, 9 aa, synthetic construct
  source 1..9: note = Seed: VVVGAGDVG (KRAS G13D)
YVVFAGDVV

SEQ ID NO: 96935 - protein, 9 aa, synthetic construct
  source 1..9: note = Seed: VVVGAGDVG (KRAS G13D)
YVVFAHDVA

SEQ ID NO: 96936 - protein, 9 aa, synthetic construct
  source 1..9: note = Seed: VVVGAGDVG (KRAS G13D)
YVVFAHDVG

SEQ ID NO: 96937 - protein, 9 aa, synthetic construct
  source 1..9: note = Seed: VVVGAGDVG (KRAS G13D)
YVVFAHDVH

SEQ ID NO: 96938 - protein, 9 aa, synthetic construct
  source 1..9: note = Seed: VVVGAGDVG (KRAS G13D)
YVVFAHDVI

SEQ ID NO: 96939 - protein, 9 aa, synthetic construct
  source 1..9: note = Seed: VVVGAGDVG (KRAS G13D)
YVVFAHDVL

SEQ ID NO: 96940 - protein, 9 aa, synthetic construct
  source 1..9: note = Seed: VVVGAGDVG (KRAS G13D)
YVVFAHDVM

SEQ ID NO: 96941 - protein, 9 aa, synthetic construct
  source 1..9: note = Seed: VVVGAGDVG (KRAS G13D)
YVVFAHDVN

SEQ ID NO: 96942 - protein, 9 aa, synthetic construct
  source 1..9: note = Seed: VVVGAGDVG (KRAS G13D)
YVVFAHDVQ

SEQ ID NO: 96943 - protein, 9 aa, synthetic construct
  source 1..9: note = Seed: VVVGAGDVG (KRAS G13D)
YVVFAHDVS

SEQ ID NO: 96944 - protein, 9 aa, synthetic construct
  source 1..9: note = Seed: VVVGAGDVG (KRAS G13D)
YVVFAHDVT

SEQ ID NO: 96945 - protein, 9 aa, synthetic construct
  source 1..9: note = Seed: VVVGAGDVG (KRAS G13D)
YVVFAHDVV

SEQ ID NO: 96946 - protein, 9 aa, synthetic construct
  source 1..9: note = Seed: VVVGAGDVG (KRAS G13D)
YVVFAIDVA

SEQ ID NO: 96947 - protein, 9 aa, synthetic construct
  source 1..9: note = Seed: VVVGAGDVG (KRAS G13D)
YVVFAIDVD

SEQ ID NO: 96948 - protein, 9 aa, synthetic construct
  source 1..9: note = Seed: VVVGAGDVG (KRAS G13D)
YVVFAIDVG

SEQ ID NO: 96949 - protein, 9 aa, synthetic construct
  source 1..9: note = Seed: VVVGAGDVG (KRAS G13D)
YVVFAIDVH

SEQ ID NO: 96950 - protein, 9 aa, synthetic construct
  source 1..9: note = Seed: VVVGAGDVG (KRAS G13D)
YVVFAIDVM

SEQ ID NO: 96951 - protein, 9 aa, synthetic construct
  source 1..9: note = Seed: VVVGAGDVG (KRAS G13D)
YVVFAIDVN

SEQ ID NO: 96952 - protein, 9 aa, synthetic construct
  source 1..9: note = Seed: VVVGAGDVG (KRAS G13D)
YVVFAIDVS

SEQ ID NO: 96953 - protein, 9 aa, synthetic construct
  source 1..9: note = Seed: VVVGAGDVG (KRAS G13D)
YVVFAIDVT

SEQ ID NO: 96954 - protein, 9 aa, synthetic construct
  source 1..9: note = Seed: VVVGAGDVG (KRAS G13D)
YVVFAKDVA

SEQ ID NO: 96955 - protein, 9 aa, synthetic construct
  source 1..9: note = Seed: VVVGAGDVG (KRAS G13D)
YVVFAMDVM

SEQ ID NO: 96956 - protein, 9 aa, synthetic construct
  source 1..9: note = Seed: VVVGAGDVG (KRAS G13D)
YVVFANDVA

SEQ ID NO: 96957 - protein, 9 aa, synthetic construct
  source 1..9: note = Seed: VVVGAGDVG (KRAS G13D)
YVVFANDVD

SEQ ID NO: 96958 - protein, 9 aa, synthetic construct
  source 1..9: note = Seed: VVVGAGDVG (KRAS G13D)
YVVFANDVE

SEQ ID NO: 96959 - protein, 9 aa, synthetic construct
  source 1..9: note = Seed: VVVGAGDVG (KRAS G13D)
YVVFANDVF

SEQ ID NO: 96960 - protein, 9 aa, synthetic construct
  source 1..9: note = Seed: VVVGAGDVG (KRAS G13D)
YVVFANDVG

SEQ ID NO: 96961 - protein, 9 aa, synthetic construct
  source 1..9: note = Seed: VVVGAGDVG (KRAS G13D)
YVVFANDVH

SEQ ID NO: 96962 - protein, 9 aa, synthetic construct
  source 1..9: note = Seed: VVVGAGDVG (KRAS G13D)
YVVFANDVI

SEQ ID NO: 96963 - protein, 9 aa, synthetic construct
  source 1..9: note = Seed: VVVGAGDVG (KRAS G13D)
YVVFANDVK

SEQ ID NO: 96964 - protein, 9 aa, synthetic construct
  source 1..9: note = Seed: VVVGAGDVG (KRAS G13D)
YVVFANDVL

SEQ ID NO: 96965 - protein, 9 aa, synthetic construct
  source 1..9: note = Seed: VVVGAGDVG (KRAS G13D)
YVVFANDVM

SEQ ID NO: 96966 - protein, 9 aa, synthetic construct
  source 1..9: note = Seed: VVVGAGDVG (KRAS G13D)
YVVFANDVN

SEQ ID NO: 96967 - protein, 9 aa, synthetic construct
  source 1..9: note = Seed: VVVGAGDVG (KRAS G13D)
YVVFANDVP

SEQ ID NO: 96968 - protein, 9 aa, synthetic construct
  source 1..9: note = Seed: VVVGAGDVG (KRAS G13D)
YVVFANDVQ

SEQ ID NO: 96969 - protein, 9 aa, synthetic construct
  source 1..9: note = Seed: VVVGAGDVG (KRAS G13D)
YVVFANDVR

SEQ ID NO: 96970 - protein, 9 aa, synthetic construct
  source 1..9: note = Seed: VVVGAGDVG (KRAS G13D)
YVVFANDVS

SEQ ID NO: 96971 - protein, 9 aa, synthetic construct
  source 1..9: note = Seed: VVVGAGDVG (KRAS G13D)
YVVFANDVT

SEQ ID NO: 96972 - protein, 9 aa, synthetic construct
  source 1..9: note = Seed: VVVGAGDVG (KRAS G13D)
YVVFANDVV

SEQ ID NO: 96973 - protein, 9 aa, synthetic construct
  source 1..9: note = Seed: VVVGAGDVG (KRAS G13D)
YVVFANDVW

SEQ ID NO: 96974 - protein, 9 aa, synthetic construct
  source 1..9: note = Seed: VVVGAGDVG (KRAS G13D)
YVVFANDVY

SEQ ID NO: 96975 - protein, 9 aa, synthetic construct
  source 1..9: note = Seed: VVVGAGDVG (KRAS G13D)
YVVFAPDVA

SEQ ID NO: 96976 - protein, 9 aa, synthetic construct
  source 1..9: note = Seed: VVVGAGDVG (KRAS G13D)
YVVFAPDVC

SEQ ID NO: 96977 - protein, 9 aa, synthetic construct
  source 1..9: note = Seed: VVVGAGDVG (KRAS G13D)
YVVFAPDVD

SEQ ID NO: 96978 - protein, 9 aa, synthetic construct
  source 1..9: note = Seed: VVVGAGDVG (KRAS G13D)
YVVFAPDVE

SEQ ID NO: 96979 - protein, 9 aa, synthetic construct
  source 1..9: note = Seed: VVVGAGDVG (KRAS G13D)
YVVFAPDVF

SEQ ID NO: 96980 - protein, 9 aa, synthetic construct
  source 1..9: note = Seed: VVVGAGDVG (KRAS G13D)
YVVFAPDVG

SEQ ID NO: 96981 - protein, 9 aa, synthetic construct
  source 1..9: note = Seed: VVVGAGDVG (KRAS G13D)
YVVFAPDVH

SEQ ID NO: 96982 - protein, 9 aa, synthetic construct
  source 1..9: note = Seed: VVVGAGDVG (KRAS G13D)
YVVFAPDVI

SEQ ID NO: 96983 - protein, 9 aa, synthetic construct
  source 1..9: note = Seed: VVVGAGDVG (KRAS G13D)
YVVFAPDVK

SEQ ID NO: 96984 - protein, 9 aa, synthetic construct
  source 1..9: note = Seed: VVVGAGDVG (KRAS G13D)
YVVFAPDVL

SEQ ID NO: 96985 - protein, 9 aa, synthetic construct
  source 1..9: note = Seed: VVVGAGDVG (KRAS G13D)
YVVFAPDVM

SEQ ID NO: 96986 - protein, 9 aa, synthetic construct
  source 1..9: note = Seed: VVVGAGDVG (KRAS G13D)
YVVFAPDVN

SEQ ID NO: 96987 - protein, 9 aa, synthetic construct
  source 1..9: note = Seed: VVVGAGDVG (KRAS G13D)
YVVFAPDVP

SEQ ID NO: 96988 - protein, 9 aa, synthetic construct
  source 1..9: note = Seed: VVVGAGDVG (KRAS G13D)
YVVFAPDVQ

SEQ ID NO: 96989 - protein, 9 aa, synthetic construct
  source 1..9: note = Seed: VVVGAGDVG (KRAS G13D)
YVVFAPDVR

SEQ ID NO: 96990 - protein, 9 aa, synthetic construct
  source 1..9: note = Seed: VVVGAGDVG (KRAS G13D)
YVVFAPDVS

SEQ ID NO: 96991 - protein, 9 aa, synthetic construct
  source 1..9: note = Seed: VVVGAGDVG (KRAS G13D)
YVVFAPDVT

SEQ ID NO: 96992 - protein, 9 aa, synthetic construct
  source 1..9: note = Seed: VVVGAGDVG (KRAS G13D)
YVVFAPDVV

SEQ ID NO: 96993 - protein, 9 aa, synthetic construct
  source 1..9: note = Seed: VVVGAGDVG (KRAS G13D)
YVVFAPDVW

SEQ ID NO: 96994 - protein, 9 aa, synthetic construct
  source 1..9: note = Seed: VVVGAGDVG (KRAS G13D)
YVVFAPDVY

SEQ ID NO: 96995 - protein, 9 aa, synthetic construct
  source 1..9: note = Seed: VVVGAGDVG (KRAS G13D)
YVVFAQDVA

SEQ ID NO: 96996 - protein, 9 aa, synthetic construct
  source 1..9: note = Seed: VVVGAGDVG (KRAS G13D)
YVVFAQDVG

SEQ ID NO: 96997 - protein, 9 aa, synthetic construct
  source 1..9: note = Seed: VVVGAGDVG (KRAS G13D)
YVVFAQDVN

SEQ ID NO: 96998 - protein, 9 aa, synthetic construct
  source 1..9: note = Seed: VVVGAGDVG (KRAS G13D)
YVVFAQDVS

SEQ ID NO: 96999 - protein, 9 aa, synthetic construct
  source 1..9: note = Seed: VVVGAGDVG (KRAS G13D)
YVVFAQDVV

SEQ ID NO: 97000 - protein, 9 aa, synthetic construct
  source 1..9: note = Seed: VVVGAGDVG (KRAS G13D)
YVVFARDVA

SEQ ID NO: 97001 - protein, 9 aa, synthetic construct
  source 1..9: note = Seed: VVVGAGDVG (KRAS G13D)
YVVFASDVA

SEQ ID NO: 97002 - protein, 9 aa, synthetic construct
  source 1..9: note = Seed: VVVGAGDVG (KRAS G13D)
YVVFASDVD

SEQ ID NO: 97003 - protein, 9 aa, synthetic construct
  source 1..9: note = Seed: VVVGAGDVG (KRAS G13D)
YVVFASDVE

SEQ ID NO: 97004 - protein, 9 aa, synthetic construct
  source 1..9: note = Seed: VVVGAGDVG (KRAS G13D)
YVVFASDVF

SEQ ID NO: 97005 - protein, 9 aa, synthetic construct
  source 1..9: note = Seed: VVVGAGDVG (KRAS G13D)
YVVFASDVG

SEQ ID NO: 97006 - protein, 9 aa, synthetic construct
  source 1..9: note = Seed: VVVGAGDVG (KRAS G13D)
YVVFASDVH

SEQ ID NO: 97007 - protein, 9 aa, synthetic construct
  source 1..9: note = Seed: VVVGAGDVG (KRAS G13D)
YVVFASDVI

SEQ ID NO: 97008 - protein, 9 aa, synthetic construct
  source 1..9: note = Seed: VVVGAGDVG (KRAS G13D)
YVVFASDVK

SEQ ID NO: 97009 - protein, 9 aa, synthetic construct
  source 1..9: note = Seed: VVVGAGDVG (KRAS G13D)
YVVFASDVL

SEQ ID NO: 97010 - protein, 9 aa, synthetic construct
  source 1..9: note = Seed: VVVGAGDVG (KRAS G13D)
YVVFASDVM

SEQ ID NO: 97011 - protein, 9 aa, synthetic construct
  source 1..9: note = Seed: VVVGAGDVG (KRAS G13D)
YVVFASDVN

SEQ ID NO: 97012 - protein, 9 aa, synthetic construct
  source 1..9: note = Seed: VVVGAGDVG (KRAS G13D)
YVVFASDVP

SEQ ID NO: 97013 - protein, 9 aa, synthetic construct
  source 1..9: note = Seed: VVVGAGDVG (KRAS G13D)
YVVFASDVQ

SEQ ID NO: 97014 - protein, 9 aa, synthetic construct
  source 1..9: note = Seed: VVVGAGDVG (KRAS G13D)
YVVFASDVR

SEQ ID NO: 97015 - protein, 9 aa, synthetic construct
  source 1..9: note = Seed: VVVGAGDVG (KRAS G13D)
YVVFASDVS

SEQ ID NO: 97016 - protein, 9 aa, synthetic construct
  source 1..9: note = Seed: VVVGAGDVG (KRAS G13D)
YVVFASDVT

SEQ ID NO: 97017 - protein, 9 aa, synthetic construct
  source 1..9: note = Seed: VVVGAGDVG (KRAS G13D)
YVVFASDVV

SEQ ID NO: 97018 - protein, 9 aa, synthetic construct
  source 1..9: note = Seed: VVVGAGDVG (KRAS G13D)
YVVFASDVY

SEQ ID NO: 97019 - protein, 9 aa, synthetic construct
  source 1..9: note = Seed: VVVGAGDVG (KRAS G13D)
YVVFATDVA

SEQ ID NO: 97020 - protein, 9 aa, synthetic construct
  source 1..9: note = Seed: VVVGAGDVG (KRAS G13D)
YVVFATDVD

SEQ ID NO: 97021 - protein, 9 aa, synthetic construct
  source 1..9: note = Seed: VVVGAGDVG (KRAS G13D)
YVVFATDVE

SEQ ID NO: 97022 - protein, 9 aa, synthetic construct
  source 1..9: note = Seed: VVVGAGDVG (KRAS G13D)
YVVFATDVF

SEQ ID NO: 97023 - protein, 9 aa, synthetic construct
  source 1..9: note = Seed: VVVGAGDVG (KRAS G13D)
YVVFATDVG

SEQ ID NO: 97024 - protein, 9 aa, synthetic construct
  source 1..9: note = Seed: VVVGAGDVG (KRAS G13D)
YVVFATDVH

SEQ ID NO: 97025 - protein, 9 aa, synthetic construct
  source 1..9: note = Seed: VVVGAGDVG (KRAS G13D)
YVVFATDVI

SEQ ID NO: 97026 - protein, 9 aa, synthetic construct
  source 1..9: note = Seed: VVVGAGDVG (KRAS G13D)
YVVFATDVK

SEQ ID NO: 97027 - protein, 9 aa, synthetic construct
  source 1..9: note = Seed: VVVGAGDVG (KRAS G13D)
YVVFATDVL

SEQ ID NO: 97028 - protein, 9 aa, synthetic construct
  source 1..9: note = Seed: VVVGAGDVG (KRAS G13D)
YVVFATDVM

SEQ ID NO: 97029 - protein, 9 aa, synthetic construct
  source 1..9: note = Seed: VVVGAGDVG (KRAS G13D)
YVVFATDVN

SEQ ID NO: 97030 - protein, 9 aa, synthetic construct
  source 1..9: note = Seed: VVVGAGDVG (KRAS G13D)
YVVFATDVP

SEQ ID NO: 97031 - protein, 9 aa, synthetic construct
  source 1..9: note = Seed: VVVGAGDVG (KRAS G13D)
YVVFATDVQ

SEQ ID NO: 97032 - protein, 9 aa, synthetic construct
  source 1..9: note = Seed: VVVGAGDVG (KRAS G13D)
YVVFATDVR

SEQ ID NO: 97033 - protein, 9 aa, synthetic construct
  source 1..9: note = Seed: VVVGAGDVG (KRAS G13D)
YVVFATDVS

SEQ ID NO: 97034 - protein, 9 aa, synthetic construct
  source 1..9: note = Seed: VVVGAGDVG (KRAS G13D)
YVVFATDVT

SEQ ID NO: 97035 - protein, 9 aa, synthetic construct
  source 1..9: note = Seed: VVVGAGDVG (KRAS G13D)
YVVFATDVV

SEQ ID NO: 97036 - protein, 9 aa, synthetic construct
  source 1..9: note = Seed: VVVGAGDVG (KRAS G13D)
YVVFATDVY

SEQ ID NO: 97037 - protein, 9 aa, synthetic construct
  source 1..9: note = Seed: VVVGAGDVG (KRAS G13D)
YVVFAVDVA

SEQ ID NO: 97038 - protein, 9 aa, synthetic construct
  source 1..9: note = Seed: VVVGAGDVG (KRAS G13D)
YVVFAVDVD

SEQ ID NO: 97039 - protein, 9 aa, synthetic construct
  source 1..9: note = Seed: VVVGAGDVG (KRAS G13D)
YVVFAVDVE

SEQ ID NO: 97040 - protein, 9 aa, synthetic construct
  source 1..9: note = Seed: VVVGAGDVG (KRAS G13D)
YVVFAVDVG

SEQ ID NO: 97041 - protein, 9 aa, synthetic construct
  source 1..9: note = Seed: VVVGAGDVG (KRAS G13D)
YVVFAVDVH

SEQ ID NO: 97042 - protein, 9 aa, synthetic construct
  source 1..9: note = Seed: VVVGAGDVG (KRAS G13D)
YVVFAVDVI

SEQ ID NO: 97043 - protein, 9 aa, synthetic construct
  source 1..9: note = Seed: VVVGAGDVG (KRAS G13D)
YVVFAVDVK

SEQ ID NO: 97044 - protein, 9 aa, synthetic construct
  source 1..9: note = Seed: VVVGAGDVG (KRAS G13D)
YVVFAVDVL

SEQ ID NO: 97045 - protein, 9 aa, synthetic construct
  source 1..9: note = Seed: VVVGAGDVG (KRAS G13D)
YVVFAVDVM

SEQ ID NO: 97046 - protein, 9 aa, synthetic construct
  source 1..9: note = Seed: VVVGAGDVG (KRAS G13D)
YVVFAVDVN

SEQ ID NO: 97047 - protein, 9 aa, synthetic construct
  source 1..9: note = Seed: VVVGAGDVG (KRAS G13D)
YVVFAVDVP

SEQ ID NO: 97048 - protein, 9 aa, synthetic construct
  source 1..9: note = Seed: VVVGAGDVG (KRAS G13D)
YVVFAVDVQ

SEQ ID NO: 97049 - protein, 9 aa, synthetic construct
  source 1..9: note = Seed: VVVGAGDVG (KRAS G13D)
YVVFAVDVR

SEQ ID NO: 97050 - protein, 9 aa, synthetic construct
  source 1..9: note = Seed: VVVGAGDVG (KRAS G13D)
YVVFAVDVS

SEQ ID NO: 97051 - protein, 9 aa, synthetic construct
  source 1..9: note = Seed: VVVGAGDVG (KRAS G13D)
YVVFAVDVT

SEQ ID NO: 97052 - protein, 9 aa, synthetic construct
  source 1..9: note = Seed: VVVGAGDVG (KRAS G13D)
YVVFAVDVV

SEQ ID NO: 97053 - protein, 9 aa, synthetic construct
  source 1..9: note = Seed: VVVGAGDVG (KRAS G13D)
YVVGAADVA

SEQ ID NO: 97054 - protein, 9 aa, synthetic construct
  source 1..9: note = Seed: VVVGAGDVG (KRAS G13D)
YVVGAADVE

SEQ ID NO: 97055 - protein, 9 aa, synthetic construct
  source 1..9: note = Seed: VVVGAGDVG (KRAS G13D)
YVVGAADVF

SEQ ID NO: 97056 - protein, 9 aa, synthetic construct
  source 1..9: note = Seed: VVVGAGDVG (KRAS G13D)
YVVGAADVG

SEQ ID NO: 97057 - protein, 9 aa, synthetic construct
  source 1..9: note = Seed: VVVGAGDVG (KRAS G13D)
YVVGAADVH

SEQ ID NO: 97058 - protein, 9 aa, synthetic construct
  source 1..9: note = Seed: VVVGAGDVG (KRAS G13D)
YVVGAADVI

SEQ ID NO: 97059 - protein, 9 aa, synthetic construct
  source 1..9: note = Seed: VVVGAGDVG (KRAS G13D)
YVVGAADVK

SEQ ID NO: 97060 - protein, 9 aa, synthetic construct
  source 1..9: note = Seed: VVVGAGDVG (KRAS G13D)
YVVGAADVL

SEQ ID NO: 97061 - protein, 9 aa, synthetic construct
  source 1..9: note = Seed: VVVGAGDVG (KRAS G13D)
YVVGAADVM

SEQ ID NO: 97062 - protein, 9 aa, synthetic construct
  source 1..9: note = Seed: VVVGAGDVG (KRAS G13D)
YVVGAADVN

SEQ ID NO: 97063 - protein, 9 aa, synthetic construct
  source 1..9: note = Seed: VVVGAGDVG (KRAS G13D)
YVVGAADVP

SEQ ID NO: 97064 - protein, 9 aa, synthetic construct
  source 1..9: note = Seed: VVVGAGDVG (KRAS G13D)
YVVGAADVQ

SEQ ID NO: 97065 - protein, 9 aa, synthetic construct
  source 1..9: note = Seed: VVVGAGDVG (KRAS G13D)
YVVGAADVR

SEQ ID NO: 97066 - protein, 9 aa, synthetic construct
  source 1..9: note = Seed: VVVGAGDVG (KRAS G13D)
YVVGAADVS

SEQ ID NO: 97067 - protein, 9 aa, synthetic construct
  source 1..9: note = Seed: VVVGAGDVG (KRAS G13D)
YVVGAADVT

SEQ ID NO: 97068 - protein, 9 aa, synthetic construct
  source 1..9: note = Seed: VVVGAGDVG (KRAS G13D)
YVVGAADVV

SEQ ID NO: 97069 - protein, 9 aa, synthetic construct
  source 1..9: note = Seed: VVVGAGDVG (KRAS G13D)
YVVGAADVW

SEQ ID NO: 97070 - protein, 9 aa, synthetic construct
  source 1..9: note = Seed: VVVGAGDVG (KRAS G13D)
YVVGAADVY

SEQ ID NO: 97071 - protein, 9 aa, synthetic construct
  source 1..9: note = Seed: VVVGAGDVG (KRAS G13D)
YVVGAFDVA

SEQ ID NO: 97072 - protein, 9 aa, synthetic construct
  source 1..9: note = Seed: VVVGAGDVG (KRAS G13D)
YVVGAGDVA

SEQ ID NO: 97073 - protein, 9 aa, synthetic construct
  source 1..9: note = Seed: VVVGAGDVG (KRAS G13D)
YVVGAHDVA

SEQ ID NO: 97074 - protein, 9 aa, synthetic construct
  source 1..9: note = Seed: VVVGAGDVG (KRAS G13D)
YVVGAIDVA

SEQ ID NO: 97075 - protein, 9 aa, synthetic construct
  source 1..9: note = Seed: VVVGAGDVG (KRAS G13D)
YVVGAIDVG

SEQ ID NO: 97076 - protein, 9 aa, synthetic construct
  source 1..9: note = Seed: VVVGAGDVG (KRAS G13D)
YVVGAIDVH

SEQ ID NO: 97077 - protein, 9 aa, synthetic construct
  source 1..9: note = Seed: VVVGAGDVG (KRAS G13D)
YVVGAIDVI

SEQ ID NO: 97078 - protein, 9 aa, synthetic construct
  source 1..9: note = Seed: VVVGAGDVG (KRAS G13D)
YVVGAIDVL

SEQ ID NO: 97079 - protein, 9 aa, synthetic construct
  source 1..9: note = Seed: VVVGAGDVG (KRAS G13D)
YVVGAIDVM

SEQ ID NO: 97080 - protein, 9 aa, synthetic construct
  source 1..9: note = Seed: VVVGAGDVG (KRAS G13D)
YVVGAIDVN

SEQ ID NO: 97081 - protein, 9 aa, synthetic construct
  source 1..9: note = Seed: VVVGAGDVG (KRAS G13D)
YVVGAIDVP

SEQ ID NO: 97082 - protein, 9 aa, synthetic construct
  source 1..9: note = Seed: VVVGAGDVG (KRAS G13D)
YVVGAIDVQ

SEQ ID NO: 97083 - protein, 9 aa, synthetic construct
  source 1..9: note = Seed: VVVGAGDVG (KRAS G13D)
YVVGAIDVS

SEQ ID NO: 97084 - protein, 9 aa, synthetic construct
  source 1..9: note = Seed: VVVGAGDVG (KRAS G13D)
YVVGAIDVT

SEQ ID NO: 97085 - protein, 9 aa, synthetic construct
  source 1..9: note = Seed: VVVGAGDVG (KRAS G13D)
YVVGAIDVV

SEQ ID NO: 97086 - protein, 9 aa, synthetic construct
  source 1..9: note = Seed: VVVGAGDVG (KRAS G13D)
YVVGAIDVY

SEQ ID NO: 97087 - protein, 9 aa, synthetic construct
  source 1..9: note = Seed: VVVGAGDVG (KRAS G13D)
YVVGALDVA

SEQ ID NO: 97088 - protein, 9 aa, synthetic construct
  source 1..9: note = Seed: VVVGAGDVG (KRAS G13D)
YVVGALDVM

SEQ ID NO: 97089 - protein, 9 aa, synthetic construct
  source 1..9: note = Seed: VVVGAGDVG (KRAS G13D)
YVVGALDVN

SEQ ID NO: 97090 - protein, 9 aa, synthetic construct
  source 1..9: note = Seed: VVVGAGDVG (KRAS G13D)
YVVGALDVS

SEQ ID NO: 97091 - protein, 9 aa, synthetic construct
  source 1..9: note = Seed: VVVGAGDVG (KRAS G13D)
YVVGALDVT

SEQ ID NO: 97092 - protein, 9 aa, synthetic construct
  source 1..9: note = Seed: VVVGAGDVG (KRAS G13D)
YVVGAMDVS

SEQ ID NO: 97093 - protein, 9 aa, synthetic construct
  source 1..9: note = Seed: VVVGAGDVG (KRAS G13D)
YVVGANDVA

SEQ ID NO: 97094 - protein, 9 aa, synthetic construct
  source 1..9: note = Seed: VVVGAGDVG (KRAS G13D)
YVVGANDVG

SEQ ID NO: 97095 - protein, 9 aa, synthetic construct
  source 1..9: note = Seed: VVVGAGDVG (KRAS G13D)
YVVGANDVH

SEQ ID NO: 97096 - protein, 9 aa, synthetic construct
  source 1..9: note = Seed: VVVGAGDVG (KRAS G13D)
YVVGANDVI

SEQ ID NO: 97097 - protein, 9 aa, synthetic construct
  source 1..9: note = Seed: VVVGAGDVG (KRAS G13D)
YVVGANDVL

SEQ ID NO: 97098 - protein, 9 aa, synthetic construct
  source 1..9: note = Seed: VVVGAGDVG (KRAS G13D)
YVVGANDVM

SEQ ID NO: 97099 - protein, 9 aa, synthetic construct
  source 1..9: note = Seed: VVVGAGDVG (KRAS G13D)
YVVGANDVN

SEQ ID NO: 97100 - protein, 9 aa, synthetic construct
  source 1..9: note = Seed: VVVGAGDVG (KRAS G13D)
YVVGANDVQ

SEQ ID NO: 97101 - protein, 9 aa, synthetic construct
  source 1..9: note = Seed: VVVGAGDVG (KRAS G13D)
YVVGANDVS

SEQ ID NO: 97102 - protein, 9 aa, synthetic construct
  source 1..9: note = Seed: VVVGAGDVG (KRAS G13D)
YVVGANDVT

SEQ ID NO: 97103 - protein, 9 aa, synthetic construct
  source 1..9: note = Seed: VVVGAGDVG (KRAS G13D)
YVVGANDVV

SEQ ID NO: 97104 - protein, 9 aa, synthetic construct
  source 1..9: note = Seed: VVVGAGDVG (KRAS G13D)
YVVGANDVY

SEQ ID NO: 97105 - protein, 9 aa, synthetic construct
  source 1..9: note = Seed: VVVGAGDVG (KRAS G13D)
YVVGAPDVA

SEQ ID NO: 97106 - protein, 9 aa, synthetic construct
  source 1..9: note = Seed: VVVGAGDVG (KRAS G13D)
YVVGAPDVF

SEQ ID NO: 97107 - protein, 9 aa, synthetic construct
  source 1..9: note = Seed: VVVGAGDVG (KRAS G13D)
YVVGAPDVI

SEQ ID NO: 97108 - protein, 9 aa, synthetic construct
  source 1..9: note = Seed: VVVGAGDVG (KRAS G13D)
YVVGAPDVL

SEQ ID NO: 97109 - protein, 9 aa, synthetic construct
  source 1..9: note = Seed: VVVGAGDVG (KRAS G13D)
YVVGAPDVM

SEQ ID NO: 97110 - protein, 9 aa, synthetic construct
  source 1..9: note = Seed: VVVGAGDVG (KRAS G13D)
YVVGAPDVN

SEQ ID NO: 97111 - protein, 9 aa, synthetic construct
  source 1..9: note = Seed: VVVGAGDVG (KRAS G13D)
YVVGAPDVS

SEQ ID NO: 97112 - protein, 9 aa, synthetic construct
  source 1..9: note = Seed: VVVGAGDVG (KRAS G13D)
YVVGAPDVV

SEQ ID NO: 97113 - protein, 9 aa, synthetic construct
  source 1..9: note = Seed: VVVGAGDVG (KRAS G13D)
YVVGAPDVY

SEQ ID NO: 97114 - protein, 9 aa, synthetic construct
  source 1..9: note = Seed: VVVGAGDVG (KRAS G13D)
YVVGAQDVA

SEQ ID NO: 97115 - protein, 9 aa, synthetic construct
  source 1..9: note = Seed: VVVGAGDVG (KRAS G13D)
YVVGASDVA

SEQ ID NO: 97116 - protein, 9 aa, synthetic construct
  source 1..9: note = Seed: VVVGAGDVG (KRAS G13D)
YVVGASDVG

SEQ ID NO: 97117 - protein, 9 aa, synthetic construct
  source 1..9: note = Seed: VVVGAGDVG (KRAS G13D)
YVVGASDVH

SEQ ID NO: 97118 - protein, 9 aa, synthetic construct
  source 1..9: note = Seed: VVVGAGDVG (KRAS G13D)
YVVGASDVI

SEQ ID NO: 97119 - protein, 9 aa, synthetic construct
  source 1..9: note = Seed: VVVGAGDVG (KRAS G13D)
YVVGASDVK

SEQ ID NO: 97120 - protein, 9 aa, synthetic construct
  source 1..9: note = Seed: VVVGAGDVG (KRAS G13D)
YVVGASDVL

SEQ ID NO: 97121 - protein, 9 aa, synthetic construct
  source 1..9: note = Seed: VVVGAGDVG (KRAS G13D)
YVVGASDVM

SEQ ID NO: 97122 - protein, 9 aa, synthetic construct
  source 1..9: note = Seed: VVVGAGDVG (KRAS G13D)
YVVGASDVN

SEQ ID NO: 97123 - protein, 9 aa, synthetic construct
  source 1..9: note = Seed: VVVGAGDVG (KRAS G13D)
YVVGASDVQ

SEQ ID NO: 97124 - protein, 9 aa, synthetic construct
  source 1..9: note = Seed: VVVGAGDVG (KRAS G13D)
YVVGASDVR

SEQ ID NO: 97125 - protein, 9 aa, synthetic construct
  source 1..9: note = Seed: VVVGAGDVG (KRAS G13D)
YVVGASDVS

SEQ ID NO: 97126 - protein, 9 aa, synthetic construct
  source 1..9: note = Seed: VVVGAGDVG (KRAS G13D)
YVVGASDVT

SEQ ID NO: 97127 - protein, 9 aa, synthetic construct
  source 1..9: note = Seed: VVVGAGDVG (KRAS G13D)
YVVGASDVV

SEQ ID NO: 97128 - protein, 9 aa, synthetic construct
  source 1..9: note = Seed: VVVGAGDVG (KRAS G13D)
YVVGASDVY

SEQ ID NO: 97129 - protein, 9 aa, synthetic construct
  source 1..9: note = Seed: VVVGAGDVG (KRAS G13D)
YVVGATDVA

SEQ ID NO: 97130 - protein, 9 aa, synthetic construct
  source 1..9: note = Seed: VVVGAGDVG (KRAS G13D)
YVVGATDVH

SEQ ID NO: 97131 - protein, 9 aa, synthetic construct
  source 1..9: note = Seed: VVVGAGDVG (KRAS G13D)
YVVGATDVI

SEQ ID NO: 97132 - protein, 9 aa, synthetic construct
  source 1..9: note = Seed: VVVGAGDVG (KRAS G13D)
YVVGATDVL

SEQ ID NO: 97133 - protein, 9 aa, synthetic construct
  source 1..9: note = Seed: VVVGAGDVG (KRAS G13D)
YVVGATDVM

SEQ ID NO: 97134 - protein, 9 aa, synthetic construct
  source 1..9: note = Seed: VVVGAGDVG (KRAS G13D)
YVVGATDVN

SEQ ID NO: 97135 - protein, 9 aa, synthetic construct
  source 1..9: note = Seed: VVVGAGDVG (KRAS G13D)
YVVGATDVQ

SEQ ID NO: 97136 - protein, 9 aa, synthetic construct
  source 1..9: note = Seed: VVVGAGDVG (KRAS G13D)
YVVGATDVS

SEQ ID NO: 97137 - protein, 9 aa, synthetic construct
  source 1..9: note = Seed: VVVGAGDVG (KRAS G13D)
YVVGATDVT

SEQ ID NO: 97138 - protein, 9 aa, synthetic construct
  source 1..9: note = Seed: VVVGAGDVG (KRAS G13D)
YVVGATDVV

SEQ ID NO: 97139 - protein, 9 aa, synthetic construct
  source 1..9: note = Seed: VVVGAGDVG (KRAS G13D)
YVVGATDVY

SEQ ID NO: 97140 - protein, 9 aa, synthetic construct
  source 1..9: note = Seed: VVVGAGDVG (KRAS G13D)
YVVGAVDVA

SEQ ID NO: 97141 - protein, 9 aa, synthetic construct
  source 1..9: note = Seed: VVVGAGDVG (KRAS G13D)
YVVGAVDVG

SEQ ID NO: 97142 - protein, 9 aa, synthetic construct
  source 1..9: note = Seed: VVVGAGDVG (KRAS G13D)
YVVGAVDVH

SEQ ID NO: 97143 - protein, 9 aa, synthetic construct
  source 1..9: note = Seed: VVVGAGDVG (KRAS G13D)
YVVGAVDVI

SEQ ID NO: 97144 - protein, 9 aa, synthetic construct
  source 1..9: note = Seed: VVVGAGDVG (KRAS G13D)
YVVGAVDVK

SEQ ID NO: 97145 - protein, 9 aa, synthetic construct
  source 1..9: note = Seed: VVVGAGDVG (KRAS G13D)
YVVGAVDVL

SEQ ID NO: 97146 - protein, 9 aa, synthetic construct
  source 1..9: note = Seed: VVVGAGDVG (KRAS G13D)
YVVGAVDVM

SEQ ID NO: 97147 - protein, 9 aa, synthetic construct
  source 1..9: note = Seed: VVVGAGDVG (KRAS G13D)
YVVGAVDVN

SEQ ID NO: 97148 - protein, 9 aa, synthetic construct
  source 1..9: note = Seed: VVVGAGDVG (KRAS G13D)
YVVGAVDVQ

SEQ ID NO: 97149 - protein, 9 aa, synthetic construct
  source 1..9: note = Seed: VVVGAGDVG (KRAS G13D)
YVVGAVDVR

SEQ ID NO: 97150 - protein, 9 aa, synthetic construct
  source 1..9: note = Seed: VVVGAGDVG (KRAS G13D)
YVVGAVDVS

SEQ ID NO: 97151 - protein, 9 aa, synthetic construct
  source 1..9: note = Seed: VVVGAGDVG (KRAS G13D)
YVVGAVDVT

SEQ ID NO: 97152 - protein, 9 aa, synthetic construct
  source 1..9: note = Seed: VVVGAGDVG (KRAS G13D)
YVVGAVDVV

SEQ ID NO: 97153 - protein, 9 aa, synthetic construct
  source 1..9: note = Seed: VVVGAGDVG (KRAS G13D)
YVVHAADVA

SEQ ID NO: 97154 - protein, 9 aa, synthetic construct
  source 1..9: note = Seed: VVVGAGDVG (KRAS G13D)
YVVHAADVC

SEQ ID NO: 97155 - protein, 9 aa, synthetic construct
  source 1..9: note = Seed: VVVGAGDVG (KRAS G13D)
YVVHAADVD

SEQ ID NO: 97156 - protein, 9 aa, synthetic construct
  source 1..9: note = Seed: VVVGAGDVG (KRAS G13D)
YVVHAADVE

SEQ ID NO: 97157 - protein, 9 aa, synthetic construct
  source 1..9: note = Seed: VVVGAGDVG (KRAS G13D)
YVVHAADVG

SEQ ID NO: 97158 - protein, 9 aa, synthetic construct
  source 1..9: note = Seed: VVVGAGDVG (KRAS G13D)
YVVHAADVH

SEQ ID NO: 97159 - protein, 9 aa, synthetic construct
  source 1..9: note = Seed: VVVGAGDVG (KRAS G13D)
YVVHAADVI

SEQ ID NO: 97160 - protein, 9 aa, synthetic construct
  source 1..9: note = Seed: VVVGAGDVG (KRAS G13D)
YVVHAADVL

SEQ ID NO: 97161 - protein, 9 aa, synthetic construct
  source 1..9: note = Seed: VVVGAGDVG (KRAS G13D)
YVVHAADVM

SEQ ID NO: 97162 - protein, 9 aa, synthetic construct
  source 1..9: note = Seed: VVVGAGDVG (KRAS G13D)
YVVHAADVN

SEQ ID NO: 97163 - protein, 9 aa, synthetic construct
  source 1..9: note = Seed: VVVGAGDVG (KRAS G13D)
YVVHAADVP

SEQ ID NO: 97164 - protein, 9 aa, synthetic construct
  source 1..9: note = Seed: VVVGAGDVG (KRAS G13D)
YVVHAADVQ

SEQ ID NO: 97165 - protein, 9 aa, synthetic construct
  source 1..9: note = Seed: VVVGAGDVG (KRAS G13D)
YVVHAADVR

SEQ ID NO: 97166 - protein, 9 aa, synthetic construct
  source 1..9: note = Seed: VVVGAGDVG (KRAS G13D)
YVVHAADVS

SEQ ID NO: 97167 - protein, 9 aa, synthetic construct
  source 1..9: note = Seed: VVVGAGDVG (KRAS G13D)
YVVHAADVT

SEQ ID NO: 97168 - protein, 9 aa, synthetic construct
  source 1..9: note = Seed: VVVGAGDVG (KRAS G13D)
YVVHAADVV

SEQ ID NO: 97169 - protein, 9 aa, synthetic construct
  source 1..9: note = Seed: VVVGAGDVG (KRAS G13D)
YVVHAADVY

SEQ ID NO: 97170 - protein, 9 aa, synthetic construct
  source 1..9: note = Seed: VVVGAGDVG (KRAS G13D)
YVVHACDVA

SEQ ID NO: 97171 - protein, 9 aa, synthetic construct
  source 1..9: note = Seed: VVVGAGDVG (KRAS G13D)
YVVHAGDVA

SEQ ID NO: 97172 - protein, 9 aa, synthetic construct
  source 1..9: note = Seed: VVVGAGDVG (KRAS G13D)
YVVHAIDVA

SEQ ID NO: 97173 - protein, 9 aa, synthetic construct
  source 1..9: note = Seed: VVVGAGDVG (KRAS G13D)
YVVHAIDVD

SEQ ID NO: 97174 - protein, 9 aa, synthetic construct
  source 1..9: note = Seed: VVVGAGDVG (KRAS G13D)
YVVHAIDVG

SEQ ID NO: 97175 - protein, 9 aa, synthetic construct
  source 1..9: note = Seed: VVVGAGDVG (KRAS G13D)
YVVHAIDVN

SEQ ID NO: 97176 - protein, 9 aa, synthetic construct
  source 1..9: note = Seed: VVVGAGDVG (KRAS G13D)
YVVHAIDVS

SEQ ID NO: 97177 - protein, 9 aa, synthetic construct
  source 1..9: note = Seed: VVVGAGDVG (KRAS G13D)
YVVHAIDVT

SEQ ID NO: 97178 - protein, 9 aa, synthetic construct
  source 1..9: note = Seed: VVVGAGDVG (KRAS G13D)
YVVHALDVI

SEQ ID NO: 97179 - protein, 9 aa, synthetic construct
  source 1..9: note = Seed: VVVGAGDVG (KRAS G13D)
YVVHALDVL

SEQ ID NO: 97180 - protein, 9 aa, synthetic construct
  source 1..9: note = Seed: VVVGAGDVG (KRAS G13D)
YVVHALDVV

SEQ ID NO: 97181 - protein, 9 aa, synthetic construct
  source 1..9: note = Seed: VVVGAGDVG (KRAS G13D)
YVVHANDVA

SEQ ID NO: 97182 - protein, 9 aa, synthetic construct
  source 1..9: note = Seed: VVVGAGDVG (KRAS G13D)
YVVHANDVG

SEQ ID NO: 97183 - protein, 9 aa, synthetic construct
  source 1..9: note = Seed: VVVGAGDVG (KRAS G13D)
YVVHANDVI

SEQ ID NO: 97184 - protein, 9 aa, synthetic construct
  source 1..9: note = Seed: VVVGAGDVG (KRAS G13D)
YVVHANDVL

SEQ ID NO: 97185 - protein, 9 aa, synthetic construct
  source 1..9: note = Seed: VVVGAGDVG (KRAS G13D)
YVVHANDVM

SEQ ID NO: 97186 - protein, 9 aa, synthetic construct
  source 1..9: note = Seed: VVVGAGDVG (KRAS G13D)
YVVHANDVN

SEQ ID NO: 97187 - protein, 9 aa, synthetic construct
  source 1..9: note = Seed: VVVGAGDVG (KRAS G13D)
YVVHANDVQ

SEQ ID NO: 97188 - protein, 9 aa, synthetic construct
  source 1..9: note = Seed: VVVGAGDVG (KRAS G13D)
YVVHANDVS

SEQ ID NO: 97189 - protein, 9 aa, synthetic construct
  source 1..9: note = Seed: VVVGAGDVG (KRAS G13D)
YVVHANDVV

SEQ ID NO: 97190 - protein, 9 aa, synthetic construct
  source 1..9: note = Seed: VVVGAGDVG (KRAS G13D)
YVVHAPDVA

SEQ ID NO: 97191 - protein, 9 aa, synthetic construct
  source 1..9: note = Seed: VVVGAGDVG (KRAS G13D)
YVVHAPDVF

SEQ ID NO: 97192 - protein, 9 aa, synthetic construct
  source 1..9: note = Seed: VVVGAGDVG (KRAS G13D)
YVVHAPDVH

SEQ ID NO: 97193 - protein, 9 aa, synthetic construct
  source 1..9: note = Seed: VVVGAGDVG (KRAS G13D)
YVVHAPDVI

SEQ ID NO: 97194 - protein, 9 aa, synthetic construct
  source 1..9: note = Seed: VVVGAGDVG (KRAS G13D)
YVVHAPDVL

SEQ ID NO: 97195 - protein, 9 aa, synthetic construct
  source 1..9: note = Seed: VVVGAGDVG (KRAS G13D)
YVVHAPDVM

SEQ ID NO: 97196 - protein, 9 aa, synthetic construct
  source 1..9: note = Seed: VVVGAGDVG (KRAS G13D)
YVVHAPDVN

SEQ ID NO: 97197 - protein, 9 aa, synthetic construct
  source 1..9: note = Seed: VVVGAGDVG (KRAS G13D)
YVVHAPDVS

SEQ ID NO: 97198 - protein, 9 aa, synthetic construct
  source 1..9: note = Seed: VVVGAGDVG (KRAS G13D)
YVVHAPDVT

SEQ ID NO: 97199 - protein, 9 aa, synthetic construct
  source 1..9: note = Seed: VVVGAGDVG (KRAS G13D)
YVVHAPDVV

SEQ ID NO: 97200 - protein, 9 aa, synthetic construct
  source 1..9: note = Seed: VVVGAGDVG (KRAS G13D)
YVVHAPDVY

SEQ ID NO: 97201 - protein, 9 aa, synthetic construct
  source 1..9: note = Seed: VVVGAGDVG (KRAS G13D)
YVVHASDVA

SEQ ID NO: 97202 - protein, 9 aa, synthetic construct
  source 1..9: note = Seed: VVVGAGDVG (KRAS G13D)
YVVHASDVE

SEQ ID NO: 97203 - protein, 9 aa, synthetic construct
  source 1..9: note = Seed: VVVGAGDVG (KRAS G13D)
YVVHASDVG

SEQ ID NO: 97204 - protein, 9 aa, synthetic construct
  source 1..9: note = Seed: VVVGAGDVG (KRAS G13D)
YVVHASDVH

SEQ ID NO: 97205 - protein, 9 aa, synthetic construct
  source 1..9: note = Seed: VVVGAGDVG (KRAS G13D)
YVVHASDVI

SEQ ID NO: 97206 - protein, 9 aa, synthetic construct
  source 1..9: note = Seed: VVVGAGDVG (KRAS G13D)
YVVHASDVL

SEQ ID NO: 97207 - protein, 9 aa, synthetic construct
  source 1..9: note = Seed: VVVGAGDVG (KRAS G13D)
YVVHASDVM

SEQ ID NO: 97208 - protein, 9 aa, synthetic construct
  source 1..9: note = Seed: VVVGAGDVG (KRAS G13D)
YVVHASDVN

SEQ ID NO: 97209 - protein, 9 aa, synthetic construct
  source 1..9: note = Seed: VVVGAGDVG (KRAS G13D)
YVVHASDVQ

SEQ ID NO: 97210 - protein, 9 aa, synthetic construct
  source 1..9: note = Seed: VVVGAGDVG (KRAS G13D)
YVVHASDVS

SEQ ID NO: 97211 - protein, 9 aa, synthetic construct
  source 1..9: note = Seed: VVVGAGDVG (KRAS G13D)
YVVHASDVT

SEQ ID NO: 97212 - protein, 9 aa, synthetic construct
  source 1..9: note = Seed: VVVGAGDVG (KRAS G13D)
YVVHASDVV

SEQ ID NO: 97213 - protein, 9 aa, synthetic construct
  source 1..9: note = Seed: VVVGAGDVG (KRAS G13D)
YVVHATDVA

SEQ ID NO: 97214 - protein, 9 aa, synthetic construct
  source 1..9: note = Seed: VVVGAGDVG (KRAS G13D)
YVVHATDVF

SEQ ID NO: 97215 - protein, 9 aa, synthetic construct
  source 1..9: note = Seed: VVVGAGDVG (KRAS G13D)
YVVHATDVH

SEQ ID NO: 97216 - protein, 9 aa, synthetic construct
  source 1..9: note = Seed: VVVGAGDVG (KRAS G13D)
YVVHATDVI

SEQ ID NO: 97217 - protein, 9 aa, synthetic construct
  source 1..9: note = Seed: VVVGAGDVG (KRAS G13D)
YVVHATDVL

SEQ ID NO: 97218 - protein, 9 aa, synthetic construct
  source 1..9: note = Seed: VVVGAGDVG (KRAS G13D)
YVVHATDVM

SEQ ID NO: 97219 - protein, 9 aa, synthetic construct
  source 1..9: note = Seed: VVVGAGDVG (KRAS G13D)
YVVHATDVN

SEQ ID NO: 97220 - protein, 9 aa, synthetic construct
  source 1..9: note = Seed: VVVGAGDVG (KRAS G13D)
YVVHATDVQ

SEQ ID NO: 97221 - protein, 9 aa, synthetic construct
  source 1..9: note = Seed: VVVGAGDVG (KRAS G13D)
YVVHATDVS

SEQ ID NO: 97222 - protein, 9 aa, synthetic construct
  source 1..9: note = Seed: VVVGAGDVG (KRAS G13D)
YVVHATDVT

SEQ ID NO: 97223 - protein, 9 aa, synthetic construct
  source 1..9: note = Seed: VVVGAGDVG (KRAS G13D)
YVVHATDVV

SEQ ID NO: 97224 - protein, 9 aa, synthetic construct
  source 1..9: note = Seed: VVVGAGDVG (KRAS G13D)
YVVHATDVW

SEQ ID NO: 97225 - protein, 9 aa, synthetic construct
  source 1..9: note = Seed: VVVGAGDVG (KRAS G13D)
YVVHAVDVA

SEQ ID NO: 97226 - protein, 9 aa, synthetic construct
  source 1..9: note = Seed: VVVGAGDVG (KRAS G13D)
YVVHAVDVE

SEQ ID NO: 97227 - protein, 9 aa, synthetic construct
  source 1..9: note = Seed: VVVGAGDVG (KRAS G13D)
YVVHAVDVG

SEQ ID NO: 97228 - protein, 9 aa, synthetic construct
  source 1..9: note = Seed: VVVGAGDVG (KRAS G13D)
YVVHAVDVH

SEQ ID NO: 97229 - protein, 9 aa, synthetic construct
  source 1..9: note = Seed: VVVGAGDVG (KRAS G13D)
YVVHAVDVI

SEQ ID NO: 97230 - protein, 9 aa, synthetic construct
  source 1..9: note = Seed: VVVGAGDVG (KRAS G13D)
YVVHAVDVL

SEQ ID NO: 97231 - protein, 9 aa, synthetic construct
  source 1..9: note = Seed: VVVGAGDVG (KRAS G13D)
YVVHAVDVM

SEQ ID NO: 97232 - protein, 9 aa, synthetic construct
  source 1..9: note = Seed: VVVGAGDVG (KRAS G13D)
YVVHAVDVN

SEQ ID NO: 97233 - protein, 9 aa, synthetic construct
  source 1..9: note = Seed: VVVGAGDVG (KRAS G13D)
YVVHAVDVQ

SEQ ID NO: 97234 - protein, 9 aa, synthetic construct
  source 1..9: note = Seed: VVVGAGDVG (KRAS G13D)
YVVHAVDVS

SEQ ID NO: 97235 - protein, 9 aa, synthetic construct
  source 1..9: note = Seed: VVVGAGDVG (KRAS G13D)
YVVHAVDVT

SEQ ID NO: 97236 - protein, 9 aa, synthetic construct
  source 1..9: note = Seed: VVVGAGDVG (KRAS G13D)
YVVHAVDVV

SEQ ID NO: 97237 - protein, 9 aa, synthetic construct
  source 1..9: note = Seed: VVVGAGDVG (KRAS G13D)
YVVIAADVA

SEQ ID NO: 97238 - protein, 9 aa, synthetic construct
  source 1..9: note = Seed: VVVGAGDVG (KRAS G13D)
YVVIAADVC

SEQ ID NO: 97239 - protein, 9 aa, synthetic construct
  source 1..9: note = Seed: VVVGAGDVG (KRAS G13D)
YVVIAADVD

SEQ ID NO: 97240 - protein, 9 aa, synthetic construct
  source 1..9: note = Seed: VVVGAGDVG (KRAS G13D)
YVVIAADVE

SEQ ID NO: 97241 - protein, 9 aa, synthetic construct
  source 1..9: note = Seed: VVVGAGDVG (KRAS G13D)
YVVIAADVF

SEQ ID NO: 97242 - protein, 9 aa, synthetic construct
  source 1..9: note = Seed: VVVGAGDVG (KRAS G13D)
YVVIAADVG

SEQ ID NO: 97243 - protein, 9 aa, synthetic construct
  source 1..9: note = Seed: VVVGAGDVG (KRAS G13D)
YVVIAADVH

SEQ ID NO: 97244 - protein, 9 aa, synthetic construct
  source 1..9: note = Seed: VVVGAGDVG (KRAS G13D)
YVVIAADVI

SEQ ID NO: 97245 - protein, 9 aa, synthetic construct
  source 1..9: note = Seed: VVVGAGDVG (KRAS G13D)
YVVIAADVK

SEQ ID NO: 97246 - protein, 9 aa, synthetic construct
  source 1..9: note = Seed: VVVGAGDVG (KRAS G13D)
YVVIAADVL

SEQ ID NO: 97247 - protein, 9 aa, synthetic construct
  source 1..9: note = Seed: VVVGAGDVG (KRAS G13D)
YVVIAADVM

SEQ ID NO: 97248 - protein, 9 aa, synthetic construct
  source 1..9: note = Seed: VVVGAGDVG (KRAS G13D)
YVVIAADVN

SEQ ID NO: 97249 - protein, 9 aa, synthetic construct
  source 1..9: note = Seed: VVVGAGDVG (KRAS G13D)
YVVIAADVP

SEQ ID NO: 97250 - protein, 9 aa, synthetic construct
  source 1..9: note = Seed: VVVGAGDVG (KRAS G13D)
YVVIAADVQ

SEQ ID NO: 97251 - protein, 9 aa, synthetic construct
  source 1..9: note = Seed: VVVGAGDVG (KRAS G13D)
YVVIAADVR

SEQ ID NO: 97252 - protein, 9 aa, synthetic construct
  source 1..9: note = Seed: VVVGAGDVG (KRAS G13D)
YVVIAADVS

SEQ ID NO: 97253 - protein, 9 aa, synthetic construct
  source 1..9: note = Seed: VVVGAGDVG (KRAS G13D)
YVVIAADVT

SEQ ID NO: 97254 - protein, 9 aa, synthetic construct
  source 1..9: note = Seed: VVVGAGDVG (KRAS G13D)
YVVIAADVV

SEQ ID NO: 97255 - protein, 9 aa, synthetic construct
  source 1..9: note = Seed: VVVGAGDVG (KRAS G13D)
YVVIAADVW

SEQ ID NO: 97256 - protein, 9 aa, synthetic construct
  source 1..9: note = Seed: VVVGAGDVG (KRAS G13D)
YVVIAADVY

SEQ ID NO: 97257 - protein, 9 aa, synthetic construct
  source 1..9: note = Seed: VVVGAGDVG (KRAS G13D)
YVVIACDVA

SEQ ID NO: 97258 - protein, 9 aa, synthetic construct
  source 1..9: note = Seed: VVVGAGDVG (KRAS G13D)
YVVIACDVN

SEQ ID NO: 97259 - protein, 9 aa, synthetic construct
  source 1..9: note = Seed: VVVGAGDVG (KRAS G13D)
YVVIADDVA

SEQ ID NO: 97260 - protein, 9 aa, synthetic construct
  source 1..9: note = Seed: VVVGAGDVG (KRAS G13D)
YVVIADDVN

SEQ ID NO: 97261 - protein, 9 aa, synthetic construct
  source 1..9: note = Seed: VVVGAGDVG (KRAS G13D)
YVVIADDVS

SEQ ID NO: 97262 - protein, 9 aa, synthetic construct
  source 1..9: note = Seed: VVVGAGDVG (KRAS G13D)
YVVIADDVT

SEQ ID NO: 97263 - protein, 9 aa, synthetic construct
  source 1..9: note = Seed: VVVGAGDVG (KRAS G13D)
YVVIAEDVA

SEQ ID NO: 97264 - protein, 9 aa, synthetic construct
  source 1..9: note = Seed: VVVGAGDVG (KRAS G13D)
YVVIAEDVG

SEQ ID NO: 97265 - protein, 9 aa, synthetic construct
  source 1..9: note = Seed: VVVGAGDVG (KRAS G13D)
YVVIAEDVH

SEQ ID NO: 97266 - protein, 9 aa, synthetic construct
  source 1..9: note = Seed: VVVGAGDVG (KRAS G13D)
YVVIAEDVI

SEQ ID NO: 97267 - protein, 9 aa, synthetic construct
  source 1..9: note = Seed: VVVGAGDVG (KRAS G13D)
YVVIAEDVK

SEQ ID NO: 97268 - protein, 9 aa, synthetic construct
  source 1..9: note = Seed: VVVGAGDVG (KRAS G13D)
YVVIAEDVL

SEQ ID NO: 97269 - protein, 9 aa, synthetic construct
  source 1..9: note = Seed: VVVGAGDVG (KRAS G13D)
YVVIAEDVM

SEQ ID NO: 97270 - protein, 9 aa, synthetic construct
  source 1..9: note = Seed: VVVGAGDVG (KRAS G13D)
YVVIAEDVN

SEQ ID NO: 97271 - protein, 9 aa, synthetic construct
  source 1..9: note = Seed: VVVGAGDVG (KRAS G13D)
YVVIAEDVP

SEQ ID NO: 97272 - protein, 9 aa, synthetic construct
  source 1..9: note = Seed: VVVGAGDVG (KRAS G13D)
YVVIAEDVQ

SEQ ID NO: 97273 - protein, 9 aa, synthetic construct
  source 1..9: note = Seed: VVVGAGDVG (KRAS G13D)
YVVIAEDVR

SEQ ID NO: 97274 - protein, 9 aa, synthetic construct
  source 1..9: note = Seed: VVVGAGDVG (KRAS G13D)
YVVIAEDVS

SEQ ID NO: 97275 - protein, 9 aa, synthetic construct
  source 1..9: note = Seed: VVVGAGDVG (KRAS G13D)
YVVIAEDVT

SEQ ID NO: 97276 - protein, 9 aa, synthetic construct
  source 1..9: note = Seed: VVVGAGDVG (KRAS G13D)
YVVIAEDVV

SEQ ID NO: 97277 - protein, 9 aa, synthetic construct
  source 1..9: note = Seed: VVVGAGDVG (KRAS G13D)
YVVIAEDVY

SEQ ID NO: 97278 - protein, 9 aa, synthetic construct
  source 1..9: note = Seed: VVVGAGDVG (KRAS G13D)
YVVIAFDVN

SEQ ID NO: 97279 - protein, 9 aa, synthetic construct
  source 1..9: note = Seed: VVVGAGDVG (KRAS G13D)
YVVIAGDVA

SEQ ID NO: 97280 - protein, 9 aa, synthetic construct
  source 1..9: note = Seed: VVVGAGDVG (KRAS G13D)
YVVIAGDVD

SEQ ID NO: 97281 - protein, 9 aa, synthetic construct
  source 1..9: note = Seed: VVVGAGDVG (KRAS G13D)
YVVIAGDVE

SEQ ID NO: 97282 - protein, 9 aa, synthetic construct
  source 1..9: note = Seed: VVVGAGDVG (KRAS G13D)
YVVIAGDVF

SEQ ID NO: 97283 - protein, 9 aa, synthetic construct
  source 1..9: note = Seed: VVVGAGDVG (KRAS G13D)
YVVIAGDVG

SEQ ID NO: 97284 - protein, 9 aa, synthetic construct
  source 1..9: note = Seed: VVVGAGDVG (KRAS G13D)
YVVIAGDVH

SEQ ID NO: 97285 - protein, 9 aa, synthetic construct
  source 1..9: note = Seed: VVVGAGDVG (KRAS G13D)
YVVIAGDVI

SEQ ID NO: 97286 - protein, 9 aa, synthetic construct
  source 1..9: note = Seed: VVVGAGDVG (KRAS G13D)
YVVIAGDVK

SEQ ID NO: 97287 - protein, 9 aa, synthetic construct
  source 1..9: note = Seed: VVVGAGDVG (KRAS G13D)
YVVIAGDVL

SEQ ID NO: 97288 - protein, 9 aa, synthetic construct
  source 1..9: note = Seed: VVVGAGDVG (KRAS G13D)
YVVIAGDVM

SEQ ID NO: 97289 - protein, 9 aa, synthetic construct
  source 1..9: note = Seed: VVVGAGDVG (KRAS G13D)
YVVIAGDVN

SEQ ID NO: 97290 - protein, 9 aa, synthetic construct
  source 1..9: note = Seed: VVVGAGDVG (KRAS G13D)
YVVIAGDVP

SEQ ID NO: 97291 - protein, 9 aa, synthetic construct
  source 1..9: note = Seed: VVVGAGDVG (KRAS G13D)
YVVIAGDVQ

SEQ ID NO: 97292 - protein, 9 aa, synthetic construct
  source 1..9: note = Seed: VVVGAGDVG (KRAS G13D)
YVVIAGDVR

SEQ ID NO: 97293 - protein, 9 aa, synthetic construct
  source 1..9: note = Seed: VVVGAGDVG (KRAS G13D)
YVVIAGDVS

SEQ ID NO: 97294 - protein, 9 aa, synthetic construct
  source 1..9: note = Seed: VVVGAGDVG (KRAS G13D)
YVVIAGDVT

SEQ ID NO: 97295 - protein, 9 aa, synthetic construct
  source 1..9: note = Seed: VVVGAGDVG (KRAS G13D)
YVVIAGDVV

SEQ ID NO: 97296 - protein, 9 aa, synthetic construct
  source 1..9: note = Seed: VVVGAGDVG (KRAS G13D)
YVVIAGDVY

SEQ ID NO: 97297 - protein, 9 aa, synthetic construct
  source 1..9: note = Seed: VVVGAGDVG (KRAS G13D)
YVVIAHDVA

SEQ ID NO: 97298 - protein, 9 aa, synthetic construct
  source 1..9: note = Seed: VVVGAGDVG (KRAS G13D)
YVVIAHDVD

SEQ ID NO: 97299 - protein, 9 aa, synthetic construct
  source 1..9: note = Seed: VVVGAGDVG (KRAS G13D)
YVVIAHDVE

SEQ ID NO: 97300 - protein, 9 aa, synthetic construct
  source 1..9: note = Seed: VVVGAGDVG (KRAS G13D)
YVVIAHDVF

SEQ ID NO: 97301 - protein, 9 aa, synthetic construct
  source 1..9: note = Seed: VVVGAGDVG (KRAS G13D)
YVVIAHDVG

SEQ ID NO: 97302 - protein, 9 aa, synthetic construct
  source 1..9: note = Seed: VVVGAGDVG (KRAS G13D)
YVVIAHDVH

SEQ ID NO: 97303 - protein, 9 aa, synthetic construct
  source 1..9: note = Seed: VVVGAGDVG (KRAS G13D)
YVVIAHDVI

SEQ ID NO: 97304 - protein, 9 aa, synthetic construct
  source 1..9: note = Seed: VVVGAGDVG (KRAS G13D)
YVVIAHDVL

SEQ ID NO: 97305 - protein, 9 aa, synthetic construct
  source 1..9: note = Seed: VVVGAGDVG (KRAS G13D)
YVVIAHDVM

SEQ ID NO: 97306 - protein, 9 aa, synthetic construct
  source 1..9: note = Seed: VVVGAGDVG (KRAS G13D)
YVVIAHDVN

SEQ ID NO: 97307 - protein, 9 aa, synthetic construct
  source 1..9: note = Seed: VVVGAGDVG (KRAS G13D)
YVVIAHDVP

SEQ ID NO: 97308 - protein, 9 aa, synthetic construct
  source 1..9: note = Seed: VVVGAGDVG (KRAS G13D)
YVVIAHDVQ

SEQ ID NO: 97309 - protein, 9 aa, synthetic construct
  source 1..9: note = Seed: VVVGAGDVG (KRAS G13D)
YVVIAHDVS

SEQ ID NO: 97310 - protein, 9 aa, synthetic construct
  source 1..9: note = Seed: VVVGAGDVG (KRAS G13D)
YVVIAHDVT

SEQ ID NO: 97311 - protein, 9 aa, synthetic construct
  source 1..9: note = Seed: VVVGAGDVG (KRAS G13D)
YVVIAHDVV

SEQ ID NO: 97312 - protein, 9 aa, synthetic construct
  source 1..9: note = Seed: VVVGAGDVG (KRAS G13D)
YVVIAHDVY

SEQ ID NO: 97313 - protein, 9 aa, synthetic construct
  source 1..9: note = Seed: VVVGAGDVG (KRAS G13D)
YVVIAIDVA

SEQ ID NO: 97314 - protein, 9 aa, synthetic construct
  source 1..9: note = Seed: VVVGAGDVG (KRAS G13D)
YVVIAIDVD

SEQ ID NO: 97315 - protein, 9 aa, synthetic construct
  source 1..9: note = Seed: VVVGAGDVG (KRAS G13D)
YVVIAIDVE

SEQ ID NO: 97316 - protein, 9 aa, synthetic construct
  source 1..9: note = Seed: VVVGAGDVG (KRAS G13D)
YVVIAIDVG

SEQ ID NO: 97317 - protein, 9 aa, synthetic construct
  source 1..9: note = Seed: VVVGAGDVG (KRAS G13D)
YVVIAIDVH

SEQ ID NO: 97318 - protein, 9 aa, synthetic construct
  source 1..9: note = Seed: VVVGAGDVG (KRAS G13D)
YVVIAIDVI

SEQ ID NO: 97319 - protein, 9 aa, synthetic construct
  source 1..9: note = Seed: VVVGAGDVG (KRAS G13D)
YVVIAIDVK

SEQ ID NO: 97320 - protein, 9 aa, synthetic construct
  source 1..9: note = Seed: VVVGAGDVG (KRAS G13D)
YVVIAIDVL

SEQ ID NO: 97321 - protein, 9 aa, synthetic construct
  source 1..9: note = Seed: VVVGAGDVG (KRAS G13D)
YVVIAIDVM

SEQ ID NO: 97322 - protein, 9 aa, synthetic construct
  source 1..9: note = Seed: VVVGAGDVG (KRAS G13D)
YVVIAIDVN

SEQ ID NO: 97323 - protein, 9 aa, synthetic construct
  source 1..9: note = Seed: VVVGAGDVG (KRAS G13D)
YVVIAIDVQ

SEQ ID NO: 97324 - protein, 9 aa, synthetic construct
  source 1..9: note = Seed: VVVGAGDVG (KRAS G13D)
YVVIAIDVR

SEQ ID NO: 97325 - protein, 9 aa, synthetic construct
  source 1..9: note = Seed: VVVGAGDVG (KRAS G13D)
YVVIAIDVS

SEQ ID NO: 97326 - protein, 9 aa, synthetic construct
  source 1..9: note = Seed: VVVGAGDVG (KRAS G13D)
YVVIAIDVT

SEQ ID NO: 97327 - protein, 9 aa, synthetic construct
  source 1..9: note = Seed: VVVGAGDVG (KRAS G13D)
YVVIAIDVV

SEQ ID NO: 97328 - protein, 9 aa, synthetic construct
  source 1..9: note = Seed: VVVGAGDVG (KRAS G13D)
YVVIAIDVY

SEQ ID NO: 97329 - protein, 9 aa, synthetic construct
  source 1..9: note = Seed: VVVGAGDVG (KRAS G13D)
YVVIAKDVA

SEQ ID NO: 97330 - protein, 9 aa, synthetic construct
  source 1..9: note = Seed: VVVGAGDVG (KRAS G13D)
YVVIAKDVS

SEQ ID NO: 97331 - protein, 9 aa, synthetic construct
  source 1..9: note = Seed: VVVGAGDVG (KRAS G13D)
YVVIAKDVT

SEQ ID NO: 97332 - protein, 9 aa, synthetic construct
  source 1..9: note = Seed: VVVGAGDVG (KRAS G13D)
YVVIALDVC

SEQ ID NO: 97333 - protein, 9 aa, synthetic construct
  source 1..9: note = Seed: VVVGAGDVG (KRAS G13D)
YVVIALDVG

SEQ ID NO: 97334 - protein, 9 aa, synthetic construct
  source 1..9: note = Seed: VVVGAGDVG (KRAS G13D)
YVVIALDVS

SEQ ID NO: 97335 - protein, 9 aa, synthetic construct
  source 1..9: note = Seed: VVVGAGDVG (KRAS G13D)
YVVIAMDVC

SEQ ID NO: 97336 - protein, 9 aa, synthetic construct
  source 1..9: note = Seed: VVVGAGDVG (KRAS G13D)
YVVIAMDVG

SEQ ID NO: 97337 - protein, 9 aa, synthetic construct
  source 1..9: note = Seed: VVVGAGDVG (KRAS G13D)
YVVIAMDVS

SEQ ID NO: 97338 - protein, 9 aa, synthetic construct
  source 1..9: note = Seed: VVVGAGDVG (KRAS G13D)
YVVIANDVA

SEQ ID NO: 97339 - protein, 9 aa, synthetic construct
  source 1..9: note = Seed: VVVGAGDVG (KRAS G13D)
YVVIANDVC

SEQ ID NO: 97340 - protein, 9 aa, synthetic construct
  source 1..9: note = Seed: VVVGAGDVG (KRAS G13D)
YVVIANDVD

SEQ ID NO: 97341 - protein, 9 aa, synthetic construct
  source 1..9: note = Seed: VVVGAGDVG (KRAS G13D)
YVVIANDVE

SEQ ID NO: 97342 - protein, 9 aa, synthetic construct
  source 1..9: note = Seed: VVVGAGDVG (KRAS G13D)
YVVIANDVF

SEQ ID NO: 97343 - protein, 9 aa, synthetic construct
  source 1..9: note = Seed: VVVGAGDVG (KRAS G13D)
YVVIANDVG

SEQ ID NO: 97344 - protein, 9 aa, synthetic construct
  source 1..9: note = Seed: VVVGAGDVG (KRAS G13D)
YVVIANDVH

SEQ ID NO: 97345 - protein, 9 aa, synthetic construct
  source 1..9: note = Seed: VVVGAGDVG (KRAS G13D)
YVVIANDVI

SEQ ID NO: 97346 - protein, 9 aa, synthetic construct
  source 1..9: note = Seed: VVVGAGDVG (KRAS G13D)
YVVIANDVK

SEQ ID NO: 97347 - protein, 9 aa, synthetic construct
  source 1..9: note = Seed: VVVGAGDVG (KRAS G13D)
YVVIANDVL

SEQ ID NO: 97348 - protein, 9 aa, synthetic construct
  source 1..9: note = Seed: VVVGAGDVG (KRAS G13D)
YVVIANDVM

SEQ ID NO: 97349 - protein, 9 aa, synthetic construct
  source 1..9: note = Seed: VVVGAGDVG (KRAS G13D)
YVVIANDVN

SEQ ID NO: 97350 - protein, 9 aa, synthetic construct
  source 1..9: note = Seed: VVVGAGDVG (KRAS G13D)
YVVIANDVP

SEQ ID NO: 97351 - protein, 9 aa, synthetic construct
  source 1..9: note = Seed: VVVGAGDVG (KRAS G13D)
YVVIANDVQ

SEQ ID NO: 97352 - protein, 9 aa, synthetic construct
  source 1..9: note = Seed: VVVGAGDVG (KRAS G13D)
YVVIANDVR

SEQ ID NO: 97353 - protein, 9 aa, synthetic construct
  source 1..9: note = Seed: VVVGAGDVG (KRAS G13D)
YVVIANDVS

SEQ ID NO: 97354 - protein, 9 aa, synthetic construct
  source 1..9: note = Seed: VVVGAGDVG (KRAS G13D)
YVVIANDVT

SEQ ID NO: 97355 - protein, 9 aa, synthetic construct
  source 1..9: note = Seed: VVVGAGDVG (KRAS G13D)
YVVIANDVV

SEQ ID NO: 97356 - protein, 9 aa, synthetic construct
  source 1..9: note = Seed: VVVGAGDVG (KRAS G13D)
YVVIANDVW

SEQ ID NO: 97357 - protein, 9 aa, synthetic construct
  source 1..9: note = Seed: VVVGAGDVG (KRAS G13D)
YVVIANDVY

SEQ ID NO: 97358 - protein, 9 aa, synthetic construct
  source 1..9: note = Seed: VVVGAGDVG (KRAS G13D)
YVVIAPDVA

SEQ ID NO: 97359 - protein, 9 aa, synthetic construct
  source 1..9: note = Seed: VVVGAGDVG (KRAS G13D)
YVVIAPDVC

SEQ ID NO: 97360 - protein, 9 aa, synthetic construct
  source 1..9: note = Seed: VVVGAGDVG (KRAS G13D)
YVVIAPDVD

SEQ ID NO: 97361 - protein, 9 aa, synthetic construct
  source 1..9: note = Seed: VVVGAGDVG (KRAS G13D)
YVVIAPDVE

SEQ ID NO: 97362 - protein, 9 aa, synthetic construct
  source 1..9: note = Seed: VVVGAGDVG (KRAS G13D)
YVVIAPDVF

SEQ ID NO: 97363 - protein, 9 aa, synthetic construct
  source 1..9: note = Seed: VVVGAGDVG (KRAS G13D)
YVVIAPDVG

SEQ ID NO: 97364 - protein, 9 aa, synthetic construct
  source 1..9: note = Seed: VVVGAGDVG (KRAS G13D)
YVVIAPDVH

SEQ ID NO: 97365 - protein, 9 aa, synthetic construct
  source 1..9: note = Seed: VVVGAGDVG (KRAS G13D)
YVVIAPDVI

SEQ ID NO: 97366 - protein, 9 aa, synthetic construct
  source 1..9: note = Seed: VVVGAGDVG (KRAS G13D)
YVVIAPDVK

SEQ ID NO: 97367 - protein, 9 aa, synthetic construct
  source 1..9: note = Seed: VVVGAGDVG (KRAS G13D)
YVVIAPDVL

SEQ ID NO: 97368 - protein, 9 aa, synthetic construct
  source 1..9: note = Seed: VVVGAGDVG (KRAS G13D)
YVVIAPDVM

SEQ ID NO: 97369 - protein, 9 aa, synthetic construct
  source 1..9: note = Seed: VVVGAGDVG (KRAS G13D)
YVVIAPDVN

SEQ ID NO: 97370 - protein, 9 aa, synthetic construct
  source 1..9: note = Seed: VVVGAGDVG (KRAS G13D)
YVVIAPDVP

SEQ ID NO: 97371 - protein, 9 aa, synthetic construct
  source 1..9: note = Seed: VVVGAGDVG (KRAS G13D)
YVVIAPDVQ

SEQ ID NO: 97372 - protein, 9 aa, synthetic construct
  source 1..9: note = Seed: VVVGAGDVG (KRAS G13D)
YVVIAPDVR

SEQ ID NO: 97373 - protein, 9 aa, synthetic construct
  source 1..9: note = Seed: VVVGAGDVG (KRAS G13D)
YVVIAPDVS

SEQ ID NO: 97374 - protein, 9 aa, synthetic construct
  source 1..9: note = Seed: VVVGAGDVG (KRAS G13D)
YVVIAPDVT

SEQ ID NO: 97375 - protein, 9 aa, synthetic construct
  source 1..9: note = Seed: VVVGAGDVG (KRAS G13D)
YVVIAPDVV

SEQ ID NO: 97376 - protein, 9 aa, synthetic construct
  source 1..9: note = Seed: VVVGAGDVG (KRAS G13D)
YVVIAPDVW

SEQ ID NO: 97377 - protein, 9 aa, synthetic construct
  source 1..9: note = Seed: VVVGAGDVG (KRAS G13D)
YVVIAPDVY

SEQ ID NO: 97378 - protein, 9 aa, synthetic construct
  source 1..9: note = Seed: VVVGAGDVG (KRAS G13D)
YVVIAQDVA

SEQ ID NO: 97379 - protein, 9 aa, synthetic construct
  source 1..9: note = Seed: VVVGAGDVG (KRAS G13D)
YVVIAQDVE

SEQ ID NO: 97380 - protein, 9 aa, synthetic construct
  source 1..9: note = Seed: VVVGAGDVG (KRAS G13D)
YVVIAQDVG

SEQ ID NO: 97381 - protein, 9 aa, synthetic construct
  source 1..9: note = Seed: VVVGAGDVG (KRAS G13D)
YVVIAQDVH

SEQ ID NO: 97382 - protein, 9 aa, synthetic construct
  source 1..9: note = Seed: VVVGAGDVG (KRAS G13D)
YVVIAQDVL

SEQ ID NO: 97383 - protein, 9 aa, synthetic construct
  source 1..9: note = Seed: VVVGAGDVG (KRAS G13D)
YVVIAQDVM

SEQ ID NO: 97384 - protein, 9 aa, synthetic construct
  source 1..9: note = Seed: VVVGAGDVG (KRAS G13D)
YVVIAQDVN

SEQ ID NO: 97385 - protein, 9 aa, synthetic construct
  source 1..9: note = Seed: VVVGAGDVG (KRAS G13D)
YVVIAQDVQ

SEQ ID NO: 97386 - protein, 9 aa, synthetic construct
  source 1..9: note = Seed: VVVGAGDVG (KRAS G13D)
YVVIAQDVS

SEQ ID NO: 97387 - protein, 9 aa, synthetic construct
  source 1..9: note = Seed: VVVGAGDVG (KRAS G13D)
YVVIAQDVT

SEQ ID NO: 97388 - protein, 9 aa, synthetic construct
  source 1..9: note = Seed: VVVGAGDVG (KRAS G13D)
YVVIAQDVV

SEQ ID NO: 97389 - protein, 9 aa, synthetic construct
  source 1..9: note = Seed: VVVGAGDVG (KRAS G13D)
YVVIARDVA

SEQ ID NO: 97390 - protein, 9 aa, synthetic construct
  source 1..9: note = Seed: VVVGAGDVG (KRAS G13D)
YVVIARDVH

SEQ ID NO: 97391 - protein, 9 aa, synthetic construct
  source 1..9: note = Seed: VVVGAGDVG (KRAS G13D)
YVVIARDVN

SEQ ID NO: 97392 - protein, 9 aa, synthetic construct
  source 1..9: note = Seed: VVVGAGDVG (KRAS G13D)
YVVIARDVS

SEQ ID NO: 97393 - protein, 9 aa, synthetic construct
  source 1..9: note = Seed: VVVGAGDVG (KRAS G13D)
YVVIASDVA

SEQ ID NO: 97394 - protein, 9 aa, synthetic construct
  source 1..9: note = Seed: VVVGAGDVG (KRAS G13D)
YVVIASDVC

SEQ ID NO: 97395 - protein, 9 aa, synthetic construct
  source 1..9: note = Seed: VVVGAGDVG (KRAS G13D)
YVVIASDVD

SEQ ID NO: 97396 - protein, 9 aa, synthetic construct
  source 1..9: note = Seed: VVVGAGDVG (KRAS G13D)
YVVIASDVE

SEQ ID NO: 97397 - protein, 9 aa, synthetic construct
  source 1..9: note = Seed: VVVGAGDVG (KRAS G13D)
YVVIASDVF

SEQ ID NO: 97398 - protein, 9 aa, synthetic construct
  source 1..9: note = Seed: VVVGAGDVG (KRAS G13D)
YVVIASDVG

SEQ ID NO: 97399 - protein, 9 aa, synthetic construct
  source 1..9: note = Seed: VVVGAGDVG (KRAS G13D)
YVVIASDVH

SEQ ID NO: 97400 - protein, 9 aa, synthetic construct
  source 1..9: note = Seed: VVVGAGDVG (KRAS G13D)
YVVIASDVI

SEQ ID NO: 97401 - protein, 9 aa, synthetic construct
  source 1..9: note = Seed: VVVGAGDVG (KRAS G13D)
YVVIASDVK

SEQ ID NO: 97402 - protein, 9 aa, synthetic construct
  source 1..9: note = Seed: VVVGAGDVG (KRAS G13D)
YVVIASDVL

SEQ ID NO: 97403 - protein, 9 aa, synthetic construct
  source 1..9: note = Seed: VVVGAGDVG (KRAS G13D)
YVVIASDVM

SEQ ID NO: 97404 - protein, 9 aa, synthetic construct
  source 1..9: note = Seed: VVVGAGDVG (KRAS G13D)
YVVIASDVN

SEQ ID NO: 97405 - protein, 9 aa, synthetic construct
  source 1..9: note = Seed: VVVGAGDVG (KRAS G13D)
YVVIASDVP

SEQ ID NO: 97406 - protein, 9 aa, synthetic construct
  source 1..9: note = Seed: VVVGAGDVG (KRAS G13D)
YVVIASDVQ

SEQ ID NO: 97407 - protein, 9 aa, synthetic construct
  source 1..9: note = Seed: VVVGAGDVG (KRAS G13D)
YVVIASDVR

SEQ ID NO: 97408 - protein, 9 aa, synthetic construct
  source 1..9: note = Seed: VVVGAGDVG (KRAS G13D)
YVVIASDVS

SEQ ID NO: 97409 - protein, 9 aa, synthetic construct
  source 1..9: note = Seed: VVVGAGDVG (KRAS G13D)
YVVIASDVT

SEQ ID NO: 97410 - protein, 9 aa, synthetic construct
  source 1..9: note = Seed: VVVGAGDVG (KRAS G13D)
YVVIASDVV

SEQ ID NO: 97411 - protein, 9 aa, synthetic construct
  source 1..9: note = Seed: VVVGAGDVG (KRAS G13D)
YVVIASDVW

SEQ ID NO: 97412 - protein, 9 aa, synthetic construct
  source 1..9: note = Seed: VVVGAGDVG (KRAS G13D)
YVVIASDVY

SEQ ID NO: 97413 - protein, 9 aa, synthetic construct
  source 1..9: note = Seed: VVVGAGDVG (KRAS G13D)
YVVIATDVA

SEQ ID NO: 97414 - protein, 9 aa, synthetic construct
  source 1..9: note = Seed: VVVGAGDVG (KRAS G13D)
YVVIATDVC

SEQ ID NO: 97415 - protein, 9 aa, synthetic construct
  source 1..9: note = Seed: VVVGAGDVG (KRAS G13D)
YVVIATDVD

SEQ ID NO: 97416 - protein, 9 aa, synthetic construct
  source 1..9: note = Seed: VVVGAGDVG (KRAS G13D)
YVVIATDVE

SEQ ID NO: 97417 - protein, 9 aa, synthetic construct
  source 1..9: note = Seed: VVVGAGDVG (KRAS G13D)
YVVIATDVF

SEQ ID NO: 97418 - protein, 9 aa, synthetic construct
  source 1..9: note = Seed: VVVGAGDVG (KRAS G13D)
YVVIATDVG

SEQ ID NO: 97419 - protein, 9 aa, synthetic construct
  source 1..9: note = Seed: VVVGAGDVG (KRAS G13D)
YVVIATDVH

SEQ ID NO: 97420 - protein, 9 aa, synthetic construct
  source 1..9: note = Seed: VVVGAGDVG (KRAS G13D)
YVVIATDVI

SEQ ID NO: 97421 - protein, 9 aa, synthetic construct
  source 1..9: note = Seed: VVVGAGDVG (KRAS G13D)
YVVIATDVK

SEQ ID NO: 97422 - protein, 9 aa, synthetic construct
  source 1..9: note = Seed: VVVGAGDVG (KRAS G13D)
YVVIATDVL

SEQ ID NO: 97423 - protein, 9 aa, synthetic construct
  source 1..9: note = Seed: VVVGAGDVG (KRAS G13D)
YVVIATDVM

SEQ ID NO: 97424 - protein, 9 aa, synthetic construct
  source 1..9: note = Seed: VVVGAGDVG (KRAS G13D)
YVVIATDVN

SEQ ID NO: 97425 - protein, 9 aa, synthetic construct
  source 1..9: note = Seed: VVVGAGDVG (KRAS G13D)
YVVIATDVP

SEQ ID NO: 97426 - protein, 9 aa, synthetic construct
  source 1..9: note = Seed: VVVGAGDVG (KRAS G13D)
YVVIATDVQ

SEQ ID NO: 97427 - protein, 9 aa, synthetic construct
  source 1..9: note = Seed: VVVGAGDVG (KRAS G13D)
YVVIATDVR

SEQ ID NO: 97428 - protein, 9 aa, synthetic construct
  source 1..9: note = Seed: VVVGAGDVG (KRAS G13D)
YVVIATDVS

SEQ ID NO: 97429 - protein, 9 aa, synthetic construct
  source 1..9: note = Seed: VVVGAGDVG (KRAS G13D)
YVVIATDVT

SEQ ID NO: 97430 - protein, 9 aa, synthetic construct
  source 1..9: note = Seed: VVVGAGDVG (KRAS G13D)
YVVIATDVV

SEQ ID NO: 97431 - protein, 9 aa, synthetic construct
  source 1..9: note = Seed: VVVGAGDVG (KRAS G13D)
YVVIATDVY

SEQ ID NO: 97432 - protein, 9 aa, synthetic construct
  source 1..9: note = Seed: VVVGAGDVG (KRAS G13D)
YVVIAVDVA

SEQ ID NO: 97433 - protein, 9 aa, synthetic construct
  source 1..9: note = Seed: VVVGAGDVG (KRAS G13D)
YVVIAVDVD

SEQ ID NO: 97434 - protein, 9 aa, synthetic construct
  source 1..9: note = Seed: VVVGAGDVG (KRAS G13D)
YVVIAVDVE

SEQ ID NO: 97435 - protein, 9 aa, synthetic construct
  source 1..9: note = Seed: VVVGAGDVG (KRAS G13D)
YVVIAVDVG

SEQ ID NO: 97436 - protein, 9 aa, synthetic construct
  source 1..9: note = Seed: VVVGAGDVG (KRAS G13D)
YVVIAVDVH

SEQ ID NO: 97437 - protein, 9 aa, synthetic construct
  source 1..9: note = Seed: VVVGAGDVG (KRAS G13D)
YVVIAVDVI

SEQ ID NO: 97438 - protein, 9 aa, synthetic construct
  source 1..9: note = Seed: VVVGAGDVG (KRAS G13D)
YVVIAVDVK

SEQ ID NO: 97439 - protein, 9 aa, synthetic construct
  source 1..9: note = Seed: VVVGAGDVG (KRAS G13D)
YVVIAVDVL

SEQ ID NO: 97440 - protein, 9 aa, synthetic construct
  source 1..9: note = Seed: VVVGAGDVG (KRAS G13D)
YVVIAVDVM

SEQ ID NO: 97441 - protein, 9 aa, synthetic construct
  source 1..9: note = Seed: VVVGAGDVG (KRAS G13D)
YVVIAVDVN

SEQ ID NO: 97442 - protein, 9 aa, synthetic construct
  source 1..9: note = Seed: VVVGAGDVG (KRAS G13D)
YVVIAVDVP

SEQ ID NO: 97443 - protein, 9 aa, synthetic construct
  source 1..9: note = Seed: VVVGAGDVG (KRAS G13D)
YVVIAVDVQ

SEQ ID NO: 97444 - protein, 9 aa, synthetic construct
  source 1..9: note = Seed: VVVGAGDVG (KRAS G13D)
YVVIAVDVR

SEQ ID NO: 97445 - protein, 9 aa, synthetic construct
  source 1..9: note = Seed: VVVGAGDVG (KRAS G13D)
YVVIAVDVS

SEQ ID NO: 97446 - protein, 9 aa, synthetic construct
  source 1..9: note = Seed: VVVGAGDVG (KRAS G13D)
YVVIAVDVT

SEQ ID NO: 97447 - protein, 9 aa, synthetic construct
  source 1..9: note = Seed: VVVGAGDVG (KRAS G13D)
YVVIAVDVV

SEQ ID NO: 97448 - protein, 9 aa, synthetic construct
  source 1..9: note = Seed: VVVGAGDVG (KRAS G13D)
YVVIAVDVY

SEQ ID NO: 97449 - protein, 9 aa, synthetic construct
  source 1..9: note = Seed: VVVGAGDVG (KRAS G13D)
YVVIAWDVN

SEQ ID NO: 97450 - protein, 9 aa, synthetic construct
  source 1..9: note = Seed: VVVGAGDVG (KRAS G13D)
YVVIAYDVA

SEQ ID NO: 97451 - protein, 9 aa, synthetic construct
  source 1..9: note = Seed: VVVGAGDVG (KRAS G13D)
YVVIAYDVN

SEQ ID NO: 97452 - protein, 9 aa, synthetic construct
  source 1..9: note = Seed: VVVGAGDVG (KRAS G13D)
YVVKAADVA

SEQ ID NO: 97453 - protein, 9 aa, synthetic construct
  source 1..9: note = Seed: VVVGAGDVG (KRAS G13D)
YVVKAADVC

SEQ ID NO: 97454 - protein, 9 aa, synthetic construct
  source 1..9: note = Seed: VVVGAGDVG (KRAS G13D)
YVVKAADVD

SEQ ID NO: 97455 - protein, 9 aa, synthetic construct
  source 1..9: note = Seed: VVVGAGDVG (KRAS G13D)
YVVKAADVE

SEQ ID NO: 97456 - protein, 9 aa, synthetic construct
  source 1..9: note = Seed: VVVGAGDVG (KRAS G13D)
YVVKAADVG

SEQ ID NO: 97457 - protein, 9 aa, synthetic construct
  source 1..9: note = Seed: VVVGAGDVG (KRAS G13D)
YVVKAADVH

SEQ ID NO: 97458 - protein, 9 aa, synthetic construct
  source 1..9: note = Seed: VVVGAGDVG (KRAS G13D)
YVVKAADVI

SEQ ID NO: 97459 - protein, 9 aa, synthetic construct
  source 1..9: note = Seed: VVVGAGDVG (KRAS G13D)
YVVKAADVL

SEQ ID NO: 97460 - protein, 9 aa, synthetic construct
  source 1..9: note = Seed: VVVGAGDVG (KRAS G13D)
YVVKAADVM

SEQ ID NO: 97461 - protein, 9 aa, synthetic construct
  source 1..9: note = Seed: VVVGAGDVG (KRAS G13D)
YVVKAADVN

SEQ ID NO: 97462 - protein, 9 aa, synthetic construct
  source 1..9: note = Seed: VVVGAGDVG (KRAS G13D)
YVVKAADVQ

SEQ ID NO: 97463 - protein, 9 aa, synthetic construct
  source 1..9: note = Seed: VVVGAGDVG (KRAS G13D)
YVVKAADVS

SEQ ID NO: 97464 - protein, 9 aa, synthetic construct
  source 1..9: note = Seed: VVVGAGDVG (KRAS G13D)
YVVKAADVT

SEQ ID NO: 97465 - protein, 9 aa, synthetic construct
  source 1..9: note = Seed: VVVGAGDVG (KRAS G13D)
YVVKAADVV

SEQ ID NO: 97466 - protein, 9 aa, synthetic construct
  source 1..9: note = Seed: VVVGAGDVG (KRAS G13D)
YVVKACDVA

SEQ ID NO: 97467 - protein, 9 aa, synthetic construct
  source 1..9: note = Seed: VVVGAGDVG (KRAS G13D)
YVVKACDVL

SEQ ID NO: 97468 - protein, 9 aa, synthetic construct
  source 1..9: note = Seed: VVVGAGDVG (KRAS G13D)
YVVKAGDVA

SEQ ID NO: 97469 - protein, 9 aa, synthetic construct
  source 1..9: note = Seed: VVVGAGDVG (KRAS G13D)
YVVKAGDVL

SEQ ID NO: 97470 - protein, 9 aa, synthetic construct
  source 1..9: note = Seed: VVVGAGDVG (KRAS G13D)
YVVKAIDVC

SEQ ID NO: 97471 - protein, 9 aa, synthetic construct
  source 1..9: note = Seed: VVVGAGDVG (KRAS G13D)
YVVKAIDVD

SEQ ID NO: 97472 - protein, 9 aa, synthetic construct
  source 1..9: note = Seed: VVVGAGDVG (KRAS G13D)
YVVKAIDVG

SEQ ID NO: 97473 - protein, 9 aa, synthetic construct
  source 1..9: note = Seed: VVVGAGDVG (KRAS G13D)
YVVKAIDVS

SEQ ID NO: 97474 - protein, 9 aa, synthetic construct
  source 1..9: note = Seed: VVVGAGDVG (KRAS G13D)
YVVKANDVA

SEQ ID NO: 97475 - protein, 9 aa, synthetic construct
  source 1..9: note = Seed: VVVGAGDVG (KRAS G13D)
YVVKANDVC

SEQ ID NO: 97476 - protein, 9 aa, synthetic construct
  source 1..9: note = Seed: VVVGAGDVG (KRAS G13D)
YVVKANDVG

SEQ ID NO: 97477 - protein, 9 aa, synthetic construct
  source 1..9: note = Seed: VVVGAGDVG (KRAS G13D)
YVVKANDVI

SEQ ID NO: 97478 - protein, 9 aa, synthetic construct
  source 1..9: note = Seed: VVVGAGDVG (KRAS G13D)
YVVKANDVL

SEQ ID NO: 97479 - protein, 9 aa, synthetic construct
  source 1..9: note = Seed: VVVGAGDVG (KRAS G13D)
YVVKANDVM

SEQ ID NO: 97480 - protein, 9 aa, synthetic construct
  source 1..9: note = Seed: VVVGAGDVG (KRAS G13D)
YVVKANDVN

SEQ ID NO: 97481 - protein, 9 aa, synthetic construct
  source 1..9: note = Seed: VVVGAGDVG (KRAS G13D)
YVVKANDVS

SEQ ID NO: 97482 - protein, 9 aa, synthetic construct
  source 1..9: note = Seed: VVVGAGDVG (KRAS G13D)
YVVKANDVV

SEQ ID NO: 97483 - protein, 9 aa, synthetic construct
  source 1..9: note = Seed: VVVGAGDVG (KRAS G13D)
YVVKAPDVA

SEQ ID NO: 97484 - protein, 9 aa, synthetic construct
  source 1..9: note = Seed: VVVGAGDVG (KRAS G13D)
YVVKAPDVF

SEQ ID NO: 97485 - protein, 9 aa, synthetic construct
  source 1..9: note = Seed: VVVGAGDVG (KRAS G13D)
YVVKAPDVI

SEQ ID NO: 97486 - protein, 9 aa, synthetic construct
  source 1..9: note = Seed: VVVGAGDVG (KRAS G13D)
YVVKAPDVL

SEQ ID NO: 97487 - protein, 9 aa, synthetic construct
  source 1..9: note = Seed: VVVGAGDVG (KRAS G13D)
YVVKAPDVM

SEQ ID NO: 97488 - protein, 9 aa, synthetic construct
  source 1..9: note = Seed: VVVGAGDVG (KRAS G13D)
YVVKAPDVN

SEQ ID NO: 97489 - protein, 9 aa, synthetic construct
  source 1..9: note = Seed: VVVGAGDVG (KRAS G13D)
YVVKAPDVS

SEQ ID NO: 97490 - protein, 9 aa, synthetic construct
  source 1..9: note = Seed: VVVGAGDVG (KRAS G13D)
YVVKAPDVV

SEQ ID NO: 97491 - protein, 9 aa, synthetic construct
  source 1..9: note = Seed: VVVGAGDVG (KRAS G13D)
YVVKAPDVY

SEQ ID NO: 97492 - protein, 9 aa, synthetic construct
  source 1..9: note = Seed: VVVGAGDVG (KRAS G13D)
YVVKASDVA

SEQ ID NO: 97493 - protein, 9 aa, synthetic construct
  source 1..9: note = Seed: VVVGAGDVG (KRAS G13D)
YVVKASDVE

SEQ ID NO: 97494 - protein, 9 aa, synthetic construct
  source 1..9: note = Seed: VVVGAGDVG (KRAS G13D)
YVVKASDVG

SEQ ID NO: 97495 - protein, 9 aa, synthetic construct
  source 1..9: note = Seed: VVVGAGDVG (KRAS G13D)
YVVKASDVH

SEQ ID NO: 97496 - protein, 9 aa, synthetic construct
  source 1..9: note = Seed: VVVGAGDVG (KRAS G13D)
YVVKASDVI

SEQ ID NO: 97497 - protein, 9 aa, synthetic construct
  source 1..9: note = Seed: VVVGAGDVG (KRAS G13D)
YVVKASDVL

SEQ ID NO: 97498 - protein, 9 aa, synthetic construct
  source 1..9: note = Seed: VVVGAGDVG (KRAS G13D)
YVVKASDVM

SEQ ID NO: 97499 - protein, 9 aa, synthetic construct
  source 1..9: note = Seed: VVVGAGDVG (KRAS G13D)
YVVKASDVN

SEQ ID NO: 97500 - protein, 9 aa, synthetic construct
  source 1..9: note = Seed: VVVGAGDVG (KRAS G13D)
YVVKASDVQ

SEQ ID NO: 97501 - protein, 9 aa, synthetic construct
  source 1..9: note = Seed: VVVGAGDVG (KRAS G13D)
YVVKASDVS

SEQ ID NO: 97502 - protein, 9 aa, synthetic construct
  source 1..9: note = Seed: VVVGAGDVG (KRAS G13D)
YVVKASDVT

SEQ ID NO: 97503 - protein, 9 aa, synthetic construct
  source 1..9: note = Seed: VVVGAGDVG (KRAS G13D)
YVVKASDVV

SEQ ID NO: 97504 - protein, 9 aa, synthetic construct
  source 1..9: note = Seed: VVVGAGDVG (KRAS G13D)
YVVKATDVA

SEQ ID NO: 97505 - protein, 9 aa, synthetic construct
  source 1..9: note = Seed: VVVGAGDVG (KRAS G13D)
YVVKATDVF

SEQ ID NO: 97506 - protein, 9 aa, synthetic construct
  source 1..9: note = Seed: VVVGAGDVG (KRAS G13D)
YVVKATDVH

SEQ ID NO: 97507 - protein, 9 aa, synthetic construct
  source 1..9: note = Seed: VVVGAGDVG (KRAS G13D)
YVVKATDVI

SEQ ID NO: 97508 - protein, 9 aa, synthetic construct
  source 1..9: note = Seed: VVVGAGDVG (KRAS G13D)
YVVKATDVL

SEQ ID NO: 97509 - protein, 9 aa, synthetic construct
  source 1..9: note = Seed: VVVGAGDVG (KRAS G13D)
YVVKATDVM

SEQ ID NO: 97510 - protein, 9 aa, synthetic construct
  source 1..9: note = Seed: VVVGAGDVG (KRAS G13D)
YVVKATDVN

SEQ ID NO: 97511 - protein, 9 aa, synthetic construct
  source 1..9: note = Seed: VVVGAGDVG (KRAS G13D)
YVVKATDVQ

SEQ ID NO: 97512 - protein, 9 aa, synthetic construct
  source 1..9: note = Seed: VVVGAGDVG (KRAS G13D)
YVVKATDVS

SEQ ID NO: 97513 - protein, 9 aa, synthetic construct
  source 1..9: note = Seed: VVVGAGDVG (KRAS G13D)
YVVKATDVT

SEQ ID NO: 97514 - protein, 9 aa, synthetic construct
  source 1..9: note = Seed: VVVGAGDVG (KRAS G13D)
YVVKATDVV

SEQ ID NO: 97515 - protein, 9 aa, synthetic construct
  source 1..9: note = Seed: VVVGAGDVG (KRAS G13D)
YVVKATDVY

SEQ ID NO: 97516 - protein, 9 aa, synthetic construct
  source 1..9: note = Seed: VVVGAGDVG (KRAS G13D)
YVVKAVDVA

SEQ ID NO: 97517 - protein, 9 aa, synthetic construct
  source 1..9: note = Seed: VVVGAGDVG (KRAS G13D)
YVVKAVDVC

SEQ ID NO: 97518 - protein, 9 aa, synthetic construct
  source 1..9: note = Seed: VVVGAGDVG (KRAS G13D)
YVVKAVDVD

SEQ ID NO: 97519 - protein, 9 aa, synthetic construct
  source 1..9: note = Seed: VVVGAGDVG (KRAS G13D)
YVVKAVDVE

SEQ ID NO: 97520 - protein, 9 aa, synthetic construct
  source 1..9: note = Seed: VVVGAGDVG (KRAS G13D)
YVVKAVDVG

SEQ ID NO: 97521 - protein, 9 aa, synthetic construct
  source 1..9: note = Seed: VVVGAGDVG (KRAS G13D)
YVVKAVDVH

SEQ ID NO: 97522 - protein, 9 aa, synthetic construct
  source 1..9: note = Seed: VVVGAGDVG (KRAS G13D)
YVVKAVDVI

SEQ ID NO: 97523 - protein, 9 aa, synthetic construct
  source 1..9: note = Seed: VVVGAGDVG (KRAS G13D)
YVVKAVDVL

SEQ ID NO: 97524 - protein, 9 aa, synthetic construct
  source 1..9: note = Seed: VVVGAGDVG (KRAS G13D)
YVVKAVDVM

SEQ ID NO: 97525 - protein, 9 aa, synthetic construct
  source 1..9: note = Seed: VVVGAGDVG (KRAS G13D)
YVVKAVDVN

SEQ ID NO: 97526 - protein, 9 aa, synthetic construct
  source 1..9: note = Seed: VVVGAGDVG (KRAS G13D)
YVVKAVDVQ

SEQ ID NO: 97527 - protein, 9 aa, synthetic construct
  source 1..9: note = Seed: VVVGAGDVG (KRAS G13D)
YVVKAVDVS

SEQ ID NO: 97528 - protein, 9 aa, synthetic construct
  source 1..9: note = Seed: VVVGAGDVG (KRAS G13D)
YVVKAVDVT

SEQ ID NO: 97529 - protein, 9 aa, synthetic construct
  source 1..9: note = Seed: VVVGAGDVG (KRAS G13D)
YVVKAVDVV

SEQ ID NO: 97530 - protein, 9 aa, synthetic construct
  source 1..9: note = Seed: VVVGAGDVG (KRAS G13D)
YVVLAADVA

SEQ ID NO: 97531 - protein, 9 aa, synthetic construct
  source 1..9: note = Seed: VVVGAGDVG (KRAS G13D)
YVVLAADVC

SEQ ID NO: 97532 - protein, 9 aa, synthetic construct
  source 1..9: note = Seed: VVVGAGDVG (KRAS G13D)
YVVLAADVD

SEQ ID NO: 97533 - protein, 9 aa, synthetic construct
  source 1..9: note = Seed: VVVGAGDVG (KRAS G13D)
YVVLAADVE

SEQ ID NO: 97534 - protein, 9 aa, synthetic construct
  source 1..9: note = Seed: VVVGAGDVG (KRAS G13D)
YVVLAADVF

SEQ ID NO: 97535 - protein, 9 aa, synthetic construct
  source 1..9: note = Seed: VVVGAGDVG (KRAS G13D)
YVVLAADVG

SEQ ID NO: 97536 - protein, 9 aa, synthetic construct
  source 1..9: note = Seed: VVVGAGDVG (KRAS G13D)
YVVLAADVH

SEQ ID NO: 97537 - protein, 9 aa, synthetic construct
  source 1..9: note = Seed: VVVGAGDVG (KRAS G13D)
YVVLAADVI

SEQ ID NO: 97538 - protein, 9 aa, synthetic construct
  source 1..9: note = Seed: VVVGAGDVG (KRAS G13D)
YVVLAADVK

SEQ ID NO: 97539 - protein, 9 aa, synthetic construct
  source 1..9: note = Seed: VVVGAGDVG (KRAS G13D)
YVVLAADVL

SEQ ID NO: 97540 - protein, 9 aa, synthetic construct
  source 1..9: note = Seed: VVVGAGDVG (KRAS G13D)
YVVLAADVM

SEQ ID NO: 97541 - protein, 9 aa, synthetic construct
  source 1..9: note = Seed: VVVGAGDVG (KRAS G13D)
YVVLAADVN

SEQ ID NO: 97542 - protein, 9 aa, synthetic construct
  source 1..9: note = Seed: VVVGAGDVG (KRAS G13D)
YVVLAADVP

SEQ ID NO: 97543 - protein, 9 aa, synthetic construct
  source 1..9: note = Seed: VVVGAGDVG (KRAS G13D)
YVVLAADVQ

SEQ ID NO: 97544 - protein, 9 aa, synthetic construct
  source 1..9: note = Seed: VVVGAGDVG (KRAS G13D)
YVVLAADVR

SEQ ID NO: 97545 - protein, 9 aa, synthetic construct
  source 1..9: note = Seed: VVVGAGDVG (KRAS G13D)
YVVLAADVS

SEQ ID NO: 97546 - protein, 9 aa, synthetic construct
  source 1..9: note = Seed: VVVGAGDVG (KRAS G13D)
YVVLAADVT

SEQ ID NO: 97547 - protein, 9 aa, synthetic construct
  source 1..9: note = Seed: VVVGAGDVG (KRAS G13D)
YVVLAADVV

SEQ ID NO: 97548 - protein, 9 aa, synthetic construct
  source 1..9: note = Seed: VVVGAGDVG (KRAS G13D)
YVVLAADVW

SEQ ID NO: 97549 - protein, 9 aa, synthetic construct
  source 1..9: note = Seed: VVVGAGDVG (KRAS G13D)
YVVLAADVY

SEQ ID NO: 97550 - protein, 9 aa, synthetic construct
  source 1..9: note = Seed: VVVGAGDVG (KRAS G13D)
YVVLACDVA

SEQ ID NO: 97551 - protein, 9 aa, synthetic construct
  source 1..9: note = Seed: VVVGAGDVG (KRAS G13D)
YVVLACDVH

SEQ ID NO: 97552 - protein, 9 aa, synthetic construct
  source 1..9: note = Seed: VVVGAGDVG (KRAS G13D)
YVVLACDVN

SEQ ID NO: 97553 - protein, 9 aa, synthetic construct
  source 1..9: note = Seed: VVVGAGDVG (KRAS G13D)
YVVLADDVA

SEQ ID NO: 97554 - protein, 9 aa, synthetic construct
  source 1..9: note = Seed: VVVGAGDVG (KRAS G13D)
YVVLADDVI

SEQ ID NO: 97555 - protein, 9 aa, synthetic construct
  source 1..9: note = Seed: VVVGAGDVG (KRAS G13D)
YVVLADDVL

SEQ ID NO: 97556 - protein, 9 aa, synthetic construct
  source 1..9: note = Seed: VVVGAGDVG (KRAS G13D)
YVVLADDVM

SEQ ID NO: 97557 - protein, 9 aa, synthetic construct
  source 1..9: note = Seed: VVVGAGDVG (KRAS G13D)
YVVLADDVN

SEQ ID NO: 97558 - protein, 9 aa, synthetic construct
  source 1..9: note = Seed: VVVGAGDVG (KRAS G13D)
YVVLADDVS

SEQ ID NO: 97559 - protein, 9 aa, synthetic construct
  source 1..9: note = Seed: VVVGAGDVG (KRAS G13D)
YVVLADDVT

SEQ ID NO: 97560 - protein, 9 aa, synthetic construct
  source 1..9: note = Seed: VVVGAGDVG (KRAS G13D)
YVVLADDVV

SEQ ID NO: 97561 - protein, 9 aa, synthetic construct
  source 1..9: note = Seed: VVVGAGDVG (KRAS G13D)
YVVLAEDVA

SEQ ID NO: 97562 - protein, 9 aa, synthetic construct
  source 1..9: note = Seed: VVVGAGDVG (KRAS G13D)
YVVLAEDVG

SEQ ID NO: 97563 - protein, 9 aa, synthetic construct
  source 1..9: note = Seed: VVVGAGDVG (KRAS G13D)
YVVLAEDVH

SEQ ID NO: 97564 - protein, 9 aa, synthetic construct
  source 1..9: note = Seed: VVVGAGDVG (KRAS G13D)
YVVLAEDVI

SEQ ID NO: 97565 - protein, 9 aa, synthetic construct
  source 1..9: note = Seed: VVVGAGDVG (KRAS G13D)
YVVLAEDVK

SEQ ID NO: 97566 - protein, 9 aa, synthetic construct
  source 1..9: note = Seed: VVVGAGDVG (KRAS G13D)
YVVLAEDVL

SEQ ID NO: 97567 - protein, 9 aa, synthetic construct
  source 1..9: note = Seed: VVVGAGDVG (KRAS G13D)
YVVLAEDVM

SEQ ID NO: 97568 - protein, 9 aa, synthetic construct
  source 1..9: note = Seed: VVVGAGDVG (KRAS G13D)
YVVLAEDVN

SEQ ID NO: 97569 - protein, 9 aa, synthetic construct
  source 1..9: note = Seed: VVVGAGDVG (KRAS G13D)
YVVLAEDVP

SEQ ID NO: 97570 - protein, 9 aa, synthetic construct
  source 1..9: note = Seed: VVVGAGDVG (KRAS G13D)
YVVLAEDVQ

SEQ ID NO: 97571 - protein, 9 aa, synthetic construct
  source 1..9: note = Seed: VVVGAGDVG (KRAS G13D)
YVVLAEDVR

SEQ ID NO: 97572 - protein, 9 aa, synthetic construct
  source 1..9: note = Seed: VVVGAGDVG (KRAS G13D)
YVVLAEDVS

SEQ ID NO: 97573 - protein, 9 aa, synthetic construct
  source 1..9: note = Seed: VVVGAGDVG (KRAS G13D)
YVVLAEDVT

SEQ ID NO: 97574 - protein, 9 aa, synthetic construct
  source 1..9: note = Seed: VVVGAGDVG (KRAS G13D)
YVVLAEDVV

SEQ ID NO: 97575 - protein, 9 aa, synthetic construct
  source 1..9: note = Seed: VVVGAGDVG (KRAS G13D)
YVVLAEDVY

SEQ ID NO: 97576 - protein, 9 aa, synthetic construct
  source 1..9: note = Seed: VVVGAGDVG (KRAS G13D)
YVVLAFDVA

SEQ ID NO: 97577 - protein, 9 aa, synthetic construct
  source 1..9: note = Seed: VVVGAGDVG (KRAS G13D)
YVVLAFDVH

SEQ ID NO: 97578 - protein, 9 aa, synthetic construct
  source 1..9: note = Seed: VVVGAGDVG (KRAS G13D)
YVVLAFDVN

SEQ ID NO: 97579 - protein, 9 aa, synthetic construct
  source 1..9: note = Seed: VVVGAGDVG (KRAS G13D)
YVVLAFDVS

SEQ ID NO: 97580 - protein, 9 aa, synthetic construct
  source 1..9: note = Seed: VVVGAGDVG (KRAS G13D)
YVVLAGDVA

SEQ ID NO: 97581 - protein, 9 aa, synthetic construct
  source 1..9: note = Seed: VVVGAGDVG (KRAS G13D)
YVVLAGDVD

SEQ ID NO: 97582 - protein, 9 aa, synthetic construct
  source 1..9: note = Seed: VVVGAGDVG (KRAS G13D)
YVVLAGDVE

SEQ ID NO: 97583 - protein, 9 aa, synthetic construct
  source 1..9: note = Seed: VVVGAGDVG (KRAS G13D)
YVVLAGDVF

SEQ ID NO: 97584 - protein, 9 aa, synthetic construct
  source 1..9: note = Seed: VVVGAGDVG (KRAS G13D)
YVVLAGDVG

SEQ ID NO: 97585 - protein, 9 aa, synthetic construct
  source 1..9: note = Seed: VVVGAGDVG (KRAS G13D)
YVVLAGDVH

SEQ ID NO: 97586 - protein, 9 aa, synthetic construct
  source 1..9: note = Seed: VVVGAGDVG (KRAS G13D)
YVVLAGDVI

SEQ ID NO: 97587 - protein, 9 aa, synthetic construct
  source 1..9: note = Seed: VVVGAGDVG (KRAS G13D)
YVVLAGDVK

SEQ ID NO: 97588 - protein, 9 aa, synthetic construct
  source 1..9: note = Seed: VVVGAGDVG (KRAS G13D)
YVVLAGDVL

SEQ ID NO: 97589 - protein, 9 aa, synthetic construct
  source 1..9: note = Seed: VVVGAGDVG (KRAS G13D)
YVVLAGDVM

SEQ ID NO: 97590 - protein, 9 aa, synthetic construct
  source 1..9: note = Seed: VVVGAGDVG (KRAS G13D)
YVVLAGDVN

SEQ ID NO: 97591 - protein, 9 aa, synthetic construct
  source 1..9: note = Seed: VVVGAGDVG (KRAS G13D)
YVVLAGDVP

SEQ ID NO: 97592 - protein, 9 aa, synthetic construct
  source 1..9: note = Seed: VVVGAGDVG (KRAS G13D)
YVVLAGDVQ

SEQ ID NO: 97593 - protein, 9 aa, synthetic construct
  source 1..9: note = Seed: VVVGAGDVG (KRAS G13D)
YVVLAGDVR

SEQ ID NO: 97594 - protein, 9 aa, synthetic construct
  source 1..9: note = Seed: VVVGAGDVG (KRAS G13D)
YVVLAGDVS

SEQ ID NO: 97595 - protein, 9 aa, synthetic construct
  source 1..9: note = Seed: VVVGAGDVG (KRAS G13D)
YVVLAGDVT

SEQ ID NO: 97596 - protein, 9 aa, synthetic construct
  source 1..9: note = Seed: VVVGAGDVG (KRAS G13D)
YVVLAGDVV

SEQ ID NO: 97597 - protein, 9 aa, synthetic construct
  source 1..9: note = Seed: VVVGAGDVG (KRAS G13D)
YVVLAGDVY

SEQ ID NO: 97598 - protein, 9 aa, synthetic construct
  source 1..9: note = Seed: VVVGAGDVG (KRAS G13D)
YVVLAHDVA

SEQ ID NO: 97599 - protein, 9 aa, synthetic construct
  source 1..9: note = Seed: VVVGAGDVG (KRAS G13D)
YVVLAHDVD

SEQ ID NO: 97600 - protein, 9 aa, synthetic construct
  source 1..9: note = Seed: VVVGAGDVG (KRAS G13D)
YVVLAHDVE

SEQ ID NO: 97601 - protein, 9 aa, synthetic construct
  source 1..9: note = Seed: VVVGAGDVG (KRAS G13D)
YVVLAHDVF

SEQ ID NO: 97602 - protein, 9 aa, synthetic construct
  source 1..9: note = Seed: VVVGAGDVG (KRAS G13D)
YVVLAHDVG

SEQ ID NO: 97603 - protein, 9 aa, synthetic construct
  source 1..9: note = Seed: VVVGAGDVG (KRAS G13D)
YVVLAHDVH

SEQ ID NO: 97604 - protein, 9 aa, synthetic construct
  source 1..9: note = Seed: VVVGAGDVG (KRAS G13D)
YVVLAHDVI

SEQ ID NO: 97605 - protein, 9 aa, synthetic construct
  source 1..9: note = Seed: VVVGAGDVG (KRAS G13D)
YVVLAHDVL

SEQ ID NO: 97606 - protein, 9 aa, synthetic construct
  source 1..9: note = Seed: VVVGAGDVG (KRAS G13D)
YVVLAHDVM

SEQ ID NO: 97607 - protein, 9 aa, synthetic construct
  source 1..9: note = Seed: VVVGAGDVG (KRAS G13D)
YVVLAHDVN

SEQ ID NO: 97608 - protein, 9 aa, synthetic construct
  source 1..9: note = Seed: VVVGAGDVG (KRAS G13D)
YVVLAHDVP

SEQ ID NO: 97609 - protein, 9 aa, synthetic construct
  source 1..9: note = Seed: VVVGAGDVG (KRAS G13D)
YVVLAHDVQ

SEQ ID NO: 97610 - protein, 9 aa, synthetic construct
  source 1..9: note = Seed: VVVGAGDVG (KRAS G13D)
YVVLAHDVR

SEQ ID NO: 97611 - protein, 9 aa, synthetic construct
  source 1..9: note = Seed: VVVGAGDVG (KRAS G13D)
YVVLAHDVS

SEQ ID NO: 97612 - protein, 9 aa, synthetic construct
  source 1..9: note = Seed: VVVGAGDVG (KRAS G13D)
YVVLAHDVT

SEQ ID NO: 97613 - protein, 9 aa, synthetic construct
  source 1..9: note = Seed: VVVGAGDVG (KRAS G13D)
YVVLAHDVV

SEQ ID NO: 97614 - protein, 9 aa, synthetic construct
  source 1..9: note = Seed: VVVGAGDVG (KRAS G13D)
YVVLAHDVY

SEQ ID NO: 97615 - protein, 9 aa, synthetic construct
  source 1..9: note = Seed: VVVGAGDVG (KRAS G13D)
YVVLAIDVA

SEQ ID NO: 97616 - protein, 9 aa, synthetic construct
  source 1..9: note = Seed: VVVGAGDVG (KRAS G13D)
YVVLAIDVC

SEQ ID NO: 97617 - protein, 9 aa, synthetic construct
  source 1..9: note = Seed: VVVGAGDVG (KRAS G13D)
YVVLAIDVD

SEQ ID NO: 97618 - protein, 9 aa, synthetic construct
  source 1..9: note = Seed: VVVGAGDVG (KRAS G13D)
YVVLAIDVE

SEQ ID NO: 97619 - protein, 9 aa, synthetic construct
  source 1..9: note = Seed: VVVGAGDVG (KRAS G13D)
YVVLAIDVF

SEQ ID NO: 97620 - protein, 9 aa, synthetic construct
  source 1..9: note = Seed: VVVGAGDVG (KRAS G13D)
YVVLAIDVG

SEQ ID NO: 97621 - protein, 9 aa, synthetic construct
  source 1..9: note = Seed: VVVGAGDVG (KRAS G13D)
YVVLAIDVH

SEQ ID NO: 97622 - protein, 9 aa, synthetic construct
  source 1..9: note = Seed: VVVGAGDVG (KRAS G13D)
YVVLAIDVI

SEQ ID NO: 97623 - protein, 9 aa, synthetic construct
  source 1..9: note = Seed: VVVGAGDVG (KRAS G13D)
YVVLAIDVK

SEQ ID NO: 97624 - protein, 9 aa, synthetic construct
  source 1..9: note = Seed: VVVGAGDVG (KRAS G13D)
YVVLAIDVL

SEQ ID NO: 97625 - protein, 9 aa, synthetic construct
  source 1..9: note = Seed: VVVGAGDVG (KRAS G13D)
YVVLAIDVM

SEQ ID NO: 97626 - protein, 9 aa, synthetic construct
  source 1..9: note = Seed: VVVGAGDVG (KRAS G13D)
YVVLAIDVN

SEQ ID NO: 97627 - protein, 9 aa, synthetic construct
  source 1..9: note = Seed: VVVGAGDVG (KRAS G13D)
YVVLAIDVP

SEQ ID NO: 97628 - protein, 9 aa, synthetic construct
  source 1..9: note = Seed: VVVGAGDVG (KRAS G13D)
YVVLAIDVQ

SEQ ID NO: 97629 - protein, 9 aa, synthetic construct
  source 1..9: note = Seed: VVVGAGDVG (KRAS G13D)
YVVLAIDVR

SEQ ID NO: 97630 - protein, 9 aa, synthetic construct
  source 1..9: note = Seed: VVVGAGDVG (KRAS G13D)
YVVLAIDVS

SEQ ID NO: 97631 - protein, 9 aa, synthetic construct
  source 1..9: note = Seed: VVVGAGDVG (KRAS G13D)
YVVLAIDVT

SEQ ID NO: 97632 - protein, 9 aa, synthetic construct
  source 1..9: note = Seed: VVVGAGDVG (KRAS G13D)
YVVLAIDVV

SEQ ID NO: 97633 - protein, 9 aa, synthetic construct
  source 1..9: note = Seed: VVVGAGDVG (KRAS G13D)
YVVLAIDVY

SEQ ID NO: 97634 - protein, 9 aa, synthetic construct
  source 1..9: note = Seed: VVVGAGDVG (KRAS G13D)
YVVLAKDVA

SEQ ID NO: 97635 - protein, 9 aa, synthetic construct
  source 1..9: note = Seed: VVVGAGDVG (KRAS G13D)
YVVLAKDVI

SEQ ID NO: 97636 - protein, 9 aa, synthetic construct
  source 1..9: note = Seed: VVVGAGDVG (KRAS G13D)
YVVLAKDVL

SEQ ID NO: 97637 - protein, 9 aa, synthetic construct
  source 1..9: note = Seed: VVVGAGDVG (KRAS G13D)
YVVLAKDVM

SEQ ID NO: 97638 - protein, 9 aa, synthetic construct
  source 1..9: note = Seed: VVVGAGDVG (KRAS G13D)
YVVLAKDVN

SEQ ID NO: 97639 - protein, 9 aa, synthetic construct
  source 1..9: note = Seed: VVVGAGDVG (KRAS G13D)
YVVLAKDVS

SEQ ID NO: 97640 - protein, 9 aa, synthetic construct
  source 1..9: note = Seed: VVVGAGDVG (KRAS G13D)
YVVLAKDVT

SEQ ID NO: 97641 - protein, 9 aa, synthetic construct
  source 1..9: note = Seed: VVVGAGDVG (KRAS G13D)
YVVLAKDVV

SEQ ID NO: 97642 - protein, 9 aa, synthetic construct
  source 1..9: note = Seed: VVVGAGDVG (KRAS G13D)
YVVLALDVA

SEQ ID NO: 97643 - protein, 9 aa, synthetic construct
  source 1..9: note = Seed: VVVGAGDVG (KRAS G13D)
YVVLALDVC

SEQ ID NO: 97644 - protein, 9 aa, synthetic construct
  source 1..9: note = Seed: VVVGAGDVG (KRAS G13D)
YVVLALDVD

SEQ ID NO: 97645 - protein, 9 aa, synthetic construct
  source 1..9: note = Seed: VVVGAGDVG (KRAS G13D)
YVVLALDVG

SEQ ID NO: 97646 - protein, 9 aa, synthetic construct
  source 1..9: note = Seed: VVVGAGDVG (KRAS G13D)
YVVLALDVH

SEQ ID NO: 97647 - protein, 9 aa, synthetic construct
  source 1..9: note = Seed: VVVGAGDVG (KRAS G13D)
YVVLALDVM

SEQ ID NO: 97648 - protein, 9 aa, synthetic construct
  source 1..9: note = Seed: VVVGAGDVG (KRAS G13D)
YVVLALDVN

SEQ ID NO: 97649 - protein, 9 aa, synthetic construct
  source 1..9: note = Seed: VVVGAGDVG (KRAS G13D)
YVVLALDVS

SEQ ID NO: 97650 - protein, 9 aa, synthetic construct
  source 1..9: note = Seed: VVVGAGDVG (KRAS G13D)
YVVLALDVT

SEQ ID NO: 97651 - protein, 9 aa, synthetic construct
  source 1..9: note = Seed: VVVGAGDVG (KRAS G13D)
YVVLAMDVA

SEQ ID NO: 97652 - protein, 9 aa, synthetic construct
  source 1..9: note = Seed: VVVGAGDVG (KRAS G13D)
YVVLAMDVC

SEQ ID NO: 97653 - protein, 9 aa, synthetic construct
  source 1..9: note = Seed: VVVGAGDVG (KRAS G13D)
YVVLAMDVD

SEQ ID NO: 97654 - protein, 9 aa, synthetic construct
  source 1..9: note = Seed: VVVGAGDVG (KRAS G13D)
YVVLAMDVG

SEQ ID NO: 97655 - protein, 9 aa, synthetic construct
  source 1..9: note = Seed: VVVGAGDVG (KRAS G13D)
YVVLAMDVH

SEQ ID NO: 97656 - protein, 9 aa, synthetic construct
  source 1..9: note = Seed: VVVGAGDVG (KRAS G13D)
YVVLAMDVM

SEQ ID NO: 97657 - protein, 9 aa, synthetic construct
  source 1..9: note = Seed: VVVGAGDVG (KRAS G13D)
YVVLAMDVN

SEQ ID NO: 97658 - protein, 9 aa, synthetic construct
  source 1..9: note = Seed: VVVGAGDVG (KRAS G13D)
YVVLAMDVS

SEQ ID NO: 97659 - protein, 9 aa, synthetic construct
  source 1..9: note = Seed: VVVGAGDVG (KRAS G13D)
YVVLAMDVT

SEQ ID NO: 97660 - protein, 9 aa, synthetic construct
  source 1..9: note = Seed: VVVGAGDVG (KRAS G13D)
YVVLANDVA

SEQ ID NO: 97661 - protein, 9 aa, synthetic construct
  source 1..9: note = Seed: VVVGAGDVG (KRAS G13D)
YVVLANDVC

SEQ ID NO: 97662 - protein, 9 aa, synthetic construct
  source 1..9: note = Seed: VVVGAGDVG (KRAS G13D)
YVVLANDVD

SEQ ID NO: 97663 - protein, 9 aa, synthetic construct
  source 1..9: note = Seed: VVVGAGDVG (KRAS G13D)
YVVLANDVE

SEQ ID NO: 97664 - protein, 9 aa, synthetic construct
  source 1..9: note = Seed: VVVGAGDVG (KRAS G13D)
YVVLANDVF

SEQ ID NO: 97665 - protein, 9 aa, synthetic construct
  source 1..9: note = Seed: VVVGAGDVG (KRAS G13D)
YVVLANDVG

SEQ ID NO: 97666 - protein, 9 aa, synthetic construct
  source 1..9: note = Seed: VVVGAGDVG (KRAS G13D)
YVVLANDVH

SEQ ID NO: 97667 - protein, 9 aa, synthetic construct
  source 1..9: note = Seed: VVVGAGDVG (KRAS G13D)
YVVLANDVI

SEQ ID NO: 97668 - protein, 9 aa, synthetic construct
  source 1..9: note = Seed: VVVGAGDVG (KRAS G13D)
YVVLANDVK

SEQ ID NO: 97669 - protein, 9 aa, synthetic construct
  source 1..9: note = Seed: VVVGAGDVG (KRAS G13D)
YVVLANDVL

SEQ ID NO: 97670 - protein, 9 aa, synthetic construct
  source 1..9: note = Seed: VVVGAGDVG (KRAS G13D)
YVVLANDVM

SEQ ID NO: 97671 - protein, 9 aa, synthetic construct
  source 1..9: note = Seed: VVVGAGDVG (KRAS G13D)
YVVLANDVN

SEQ ID NO: 97672 - protein, 9 aa, synthetic construct
  source 1..9: note = Seed: VVVGAGDVG (KRAS G13D)
YVVLANDVP

SEQ ID NO: 97673 - protein, 9 aa, synthetic construct
  source 1..9: note = Seed: VVVGAGDVG (KRAS G13D)
YVVLANDVQ

SEQ ID NO: 97674 - protein, 9 aa, synthetic construct
  source 1..9: note = Seed: VVVGAGDVG (KRAS G13D)
YVVLANDVR

SEQ ID NO: 97675 - protein, 9 aa, synthetic construct
  source 1..9: note = Seed: VVVGAGDVG (KRAS G13D)
YVVLANDVS

SEQ ID NO: 97676 - protein, 9 aa, synthetic construct
  source 1..9: note = Seed: VVVGAGDVG (KRAS G13D)
YVVLANDVT

SEQ ID NO: 97677 - protein, 9 aa, synthetic construct
  source 1..9: note = Seed: VVVGAGDVG (KRAS G13D)
YVVLANDVV

SEQ ID NO: 97678 - protein, 9 aa, synthetic construct
  source 1..9: note = Seed: VVVGAGDVG (KRAS G13D)
YVVLANDVW

SEQ ID NO: 97679 - protein, 9 aa, synthetic construct
  source 1..9: note = Seed: VVVGAGDVG (KRAS G13D)
YVVLANDVY

SEQ ID NO: 97680 - protein, 9 aa, synthetic construct
  source 1..9: note = Seed: VVVGAGDVG (KRAS G13D)
YVVLAPDVA

SEQ ID NO: 97681 - protein, 9 aa, synthetic construct
  source 1..9: note = Seed: VVVGAGDVG (KRAS G13D)
YVVLAPDVC

SEQ ID NO: 97682 - protein, 9 aa, synthetic construct
  source 1..9: note = Seed: VVVGAGDVG (KRAS G13D)
YVVLAPDVD

SEQ ID NO: 97683 - protein, 9 aa, synthetic construct
  source 1..9: note = Seed: VVVGAGDVG (KRAS G13D)
YVVLAPDVE

SEQ ID NO: 97684 - protein, 9 aa, synthetic construct
  source 1..9: note = Seed: VVVGAGDVG (KRAS G13D)
YVVLAPDVF

SEQ ID NO: 97685 - protein, 9 aa, synthetic construct
  source 1..9: note = Seed: VVVGAGDVG (KRAS G13D)
YVVLAPDVG

SEQ ID NO: 97686 - protein, 9 aa, synthetic construct
  source 1..9: note = Seed: VVVGAGDVG (KRAS G13D)
YVVLAPDVH

SEQ ID NO: 97687 - protein, 9 aa, synthetic construct
  source 1..9: note = Seed: VVVGAGDVG (KRAS G13D)
YVVLAPDVI

SEQ ID NO: 97688 - protein, 9 aa, synthetic construct
  source 1..9: note = Seed: VVVGAGDVG (KRAS G13D)
YVVLAPDVK

SEQ ID NO: 97689 - protein, 9 aa, synthetic construct
  source 1..9: note = Seed: VVVGAGDVG (KRAS G13D)
YVVLAPDVL

SEQ ID NO: 97690 - protein, 9 aa, synthetic construct
  source 1..9: note = Seed: VVVGAGDVG (KRAS G13D)
YVVLAPDVM

SEQ ID NO: 97691 - protein, 9 aa, synthetic construct
  source 1..9: note = Seed: VVVGAGDVG (KRAS G13D)
YVVLAPDVN

SEQ ID NO: 97692 - protein, 9 aa, synthetic construct
  source 1..9: note = Seed: VVVGAGDVG (KRAS G13D)
YVVLAPDVP

SEQ ID NO: 97693 - protein, 9 aa, synthetic construct
  source 1..9: note = Seed: VVVGAGDVG (KRAS G13D)
YVVLAPDVQ

SEQ ID NO: 97694 - protein, 9 aa, synthetic construct
  source 1..9: note = Seed: VVVGAGDVG (KRAS G13D)
YVVLAPDVR

SEQ ID NO: 97695 - protein, 9 aa, synthetic construct
  source 1..9: note = Seed: VVVGAGDVG (KRAS G13D)
YVVLAPDVS

SEQ ID NO: 97696 - protein, 9 aa, synthetic construct
  source 1..9: note = Seed: VVVGAGDVG (KRAS G13D)
YVVLAPDVT

SEQ ID NO: 97697 - protein, 9 aa, synthetic construct
  source 1..9: note = Seed: VVVGAGDVG (KRAS G13D)
YVVLAPDVV

SEQ ID NO: 97698 - protein, 9 aa, synthetic construct
  source 1..9: note = Seed: VVVGAGDVG (KRAS G13D)
YVVLAPDVW

SEQ ID NO: 97699 - protein, 9 aa, synthetic construct
  source 1..9: note = Seed: VVVGAGDVG (KRAS G13D)
YVVLAPDVY

SEQ ID NO: 97700 - protein, 9 aa, synthetic construct
  source 1..9: note = Seed: VVVGAGDVG (KRAS G13D)
YVVLAQDVA

SEQ ID NO: 97701 - protein, 9 aa, synthetic construct
  source 1..9: note = Seed: VVVGAGDVG (KRAS G13D)
YVVLAQDVC

SEQ ID NO: 97702 - protein, 9 aa, synthetic construct
  source 1..9: note = Seed: VVVGAGDVG (KRAS G13D)
YVVLAQDVD

SEQ ID NO: 97703 - protein, 9 aa, synthetic construct
  source 1..9: note = Seed: VVVGAGDVG (KRAS G13D)
YVVLAQDVE

SEQ ID NO: 97704 - protein, 9 aa, synthetic construct
  source 1..9: note = Seed: VVVGAGDVG (KRAS G13D)
YVVLAQDVF

SEQ ID NO: 97705 - protein, 9 aa, synthetic construct
  source 1..9: note = Seed: VVVGAGDVG (KRAS G13D)
YVVLAQDVG

SEQ ID NO: 97706 - protein, 9 aa, synthetic construct
  source 1..9: note = Seed: VVVGAGDVG (KRAS G13D)
YVVLAQDVH

SEQ ID NO: 97707 - protein, 9 aa, synthetic construct
  source 1..9: note = Seed: VVVGAGDVG (KRAS G13D)
YVVLAQDVI

SEQ ID NO: 97708 - protein, 9 aa, synthetic construct
  source 1..9: note = Seed: VVVGAGDVG (KRAS G13D)
YVVLAQDVK

SEQ ID NO: 97709 - protein, 9 aa, synthetic construct
  source 1..9: note = Seed: VVVGAGDVG (KRAS G13D)
YVVLAQDVL

SEQ ID NO: 97710 - protein, 9 aa, synthetic construct
  source 1..9: note = Seed: VVVGAGDVG (KRAS G13D)
YVVLAQDVM

SEQ ID NO: 97711 - protein, 9 aa, synthetic construct
  source 1..9: note = Seed: VVVGAGDVG (KRAS G13D)
YVVLAQDVN

SEQ ID NO: 97712 - protein, 9 aa, synthetic construct
  source 1..9: note = Seed: VVVGAGDVG (KRAS G13D)
YVVLAQDVP

SEQ ID NO: 97713 - protein, 9 aa, synthetic construct
  source 1..9: note = Seed: VVVGAGDVG (KRAS G13D)
YVVLAQDVQ

SEQ ID NO: 97714 - protein, 9 aa, synthetic construct
  source 1..9: note = Seed: VVVGAGDVG (KRAS G13D)
YVVLAQDVR

SEQ ID NO: 97715 - protein, 9 aa, synthetic construct
  source 1..9: note = Seed: VVVGAGDVG (KRAS G13D)
YVVLAQDVS

SEQ ID NO: 97716 - protein, 9 aa, synthetic construct
  source 1..9: note = Seed: VVVGAGDVG (KRAS G13D)
YVVLAQDVT

SEQ ID NO: 97717 - protein, 9 aa, synthetic construct
  source 1..9: note = Seed: VVVGAGDVG (KRAS G13D)
YVVLAQDVV

SEQ ID NO: 97718 - protein, 9 aa, synthetic construct
  source 1..9: note = Seed: VVVGAGDVG (KRAS G13D)
YVVLAQDVY

SEQ ID NO: 97719 - protein, 9 aa, synthetic construct
  source 1..9: note = Seed: VVVGAGDVG (KRAS G13D)
YVVLARDVA

SEQ ID NO: 97720 - protein, 9 aa, synthetic construct
  source 1..9: note = Seed: VVVGAGDVG (KRAS G13D)
YVVLARDVH

SEQ ID NO: 97721 - protein, 9 aa, synthetic construct
  source 1..9: note = Seed: VVVGAGDVG (KRAS G13D)
YVVLARDVI

SEQ ID NO: 97722 - protein, 9 aa, synthetic construct
  source 1..9: note = Seed: VVVGAGDVG (KRAS G13D)
YVVLARDVL

SEQ ID NO: 97723 - protein, 9 aa, synthetic construct
  source 1..9: note = Seed: VVVGAGDVG (KRAS G13D)
YVVLARDVM

SEQ ID NO: 97724 - protein, 9 aa, synthetic construct
  source 1..9: note = Seed: VVVGAGDVG (KRAS G13D)
YVVLARDVN

SEQ ID NO: 97725 - protein, 9 aa, synthetic construct
  source 1..9: note = Seed: VVVGAGDVG (KRAS G13D)
YVVLARDVQ

SEQ ID NO: 97726 - protein, 9 aa, synthetic construct
  source 1..9: note = Seed: VVVGAGDVG (KRAS G13D)
YVVLARDVS

SEQ ID NO: 97727 - protein, 9 aa, synthetic construct
  source 1..9: note = Seed: VVVGAGDVG (KRAS G13D)
YVVLARDVT

SEQ ID NO: 97728 - protein, 9 aa, synthetic construct
  source 1..9: note = Seed: VVVGAGDVG (KRAS G13D)
YVVLARDVV

SEQ ID NO: 97729 - protein, 9 aa, synthetic construct
  source 1..9: note = Seed: VVVGAGDVG (KRAS G13D)
YVVLASDVA

SEQ ID NO: 97730 - protein, 9 aa, synthetic construct
  source 1..9: note = Seed: VVVGAGDVG (KRAS G13D)
YVVLASDVC

SEQ ID NO: 97731 - protein, 9 aa, synthetic construct
  source 1..9: note = Seed: VVVGAGDVG (KRAS G13D)
YVVLASDVD

SEQ ID NO: 97732 - protein, 9 aa, synthetic construct
  source 1..9: note = Seed: VVVGAGDVG (KRAS G13D)
YVVLASDVE

SEQ ID NO: 97733 - protein, 9 aa, synthetic construct
  source 1..9: note = Seed: VVVGAGDVG (KRAS G13D)
YVVLASDVF

SEQ ID NO: 97734 - protein, 9 aa, synthetic construct
  source 1..9: note = Seed: VVVGAGDVG (KRAS G13D)
YVVLASDVG

SEQ ID NO: 97735 - protein, 9 aa, synthetic construct
  source 1..9: note = Seed: VVVGAGDVG (KRAS G13D)
YVVLASDVH

SEQ ID NO: 97736 - protein, 9 aa, synthetic construct
  source 1..9: note = Seed: VVVGAGDVG (KRAS G13D)
YVVLASDVI

SEQ ID NO: 97737 - protein, 9 aa, synthetic construct
  source 1..9: note = Seed: VVVGAGDVG (KRAS G13D)
YVVLASDVK

SEQ ID NO: 97738 - protein, 9 aa, synthetic construct
  source 1..9: note = Seed: VVVGAGDVG (KRAS G13D)
YVVLASDVL

SEQ ID NO: 97739 - protein, 9 aa, synthetic construct
  source 1..9: note = Seed: VVVGAGDVG (KRAS G13D)
YVVLASDVM

SEQ ID NO: 97740 - protein, 9 aa, synthetic construct
  source 1..9: note = Seed: VVVGAGDVG (KRAS G13D)
YVVLASDVN

SEQ ID NO: 97741 - protein, 9 aa, synthetic construct
  source 1..9: note = Seed: VVVGAGDVG (KRAS G13D)
YVVLASDVP

SEQ ID NO: 97742 - protein, 9 aa, synthetic construct
  source 1..9: note = Seed: VVVGAGDVG (KRAS G13D)
YVVLASDVQ

SEQ ID NO: 97743 - protein, 9 aa, synthetic construct
  source 1..9: note = Seed: VVVGAGDVG (KRAS G13D)
YVVLASDVR

SEQ ID NO: 97744 - protein, 9 aa, synthetic construct
  source 1..9: note = Seed: VVVGAGDVG (KRAS G13D)
YVVLASDVS

SEQ ID NO: 97745 - protein, 9 aa, synthetic construct
  source 1..9: note = Seed: VVVGAGDVG (KRAS G13D)
YVVLASDVT

SEQ ID NO: 97746 - protein, 9 aa, synthetic construct
  source 1..9: note = Seed: VVVGAGDVG (KRAS G13D)
YVVLASDVV

SEQ ID NO: 97747 - protein, 9 aa, synthetic construct
  source 1..9: note = Seed: VVVGAGDVG (KRAS G13D)
YVVLASDVW

SEQ ID NO: 97748 - protein, 9 aa, synthetic construct
  source 1..9: note = Seed: VVVGAGDVG (KRAS G13D)
YVVLASDVY

SEQ ID NO: 97749 - protein, 9 aa, synthetic construct
  source 1..9: note = Seed: VVVGAGDVG (KRAS G13D)
YVVLATDVA

SEQ ID NO: 97750 - protein, 9 aa, synthetic construct
  source 1..9: note = Seed: VVVGAGDVG (KRAS G13D)
YVVLATDVC

SEQ ID NO: 97751 - protein, 9 aa, synthetic construct
  source 1..9: note = Seed: VVVGAGDVG (KRAS G13D)
YVVLATDVD

SEQ ID NO: 97752 - protein, 9 aa, synthetic construct
  source 1..9: note = Seed: VVVGAGDVG (KRAS G13D)
YVVLATDVE

SEQ ID NO: 97753 - protein, 9 aa, synthetic construct
  source 1..9: note = Seed: VVVGAGDVG (KRAS G13D)
YVVLATDVF

SEQ ID NO: 97754 - protein, 9 aa, synthetic construct
  source 1..9: note = Seed: VVVGAGDVG (KRAS G13D)
YVVLATDVG

SEQ ID NO: 97755 - protein, 9 aa, synthetic construct
  source 1..9: note = Seed: VVVGAGDVG (KRAS G13D)
YVVLATDVH

SEQ ID NO: 97756 - protein, 9 aa, synthetic construct
  source 1..9: note = Seed: VVVGAGDVG (KRAS G13D)
YVVLATDVI

SEQ ID NO: 97757 - protein, 9 aa, synthetic construct
  source 1..9: note = Seed: VVVGAGDVG (KRAS G13D)
YVVLATDVK

SEQ ID NO: 97758 - protein, 9 aa, synthetic construct
  source 1..9: note = Seed: VVVGAGDVG (KRAS G13D)
YVVLATDVL

SEQ ID NO: 97759 - protein, 9 aa, synthetic construct
  source 1..9: note = Seed: VVVGAGDVG (KRAS G13D)
YVVLATDVM

SEQ ID NO: 97760 - protein, 9 aa, synthetic construct
  source 1..9: note = Seed: VVVGAGDVG (KRAS G13D)
YVVLATDVN

SEQ ID NO: 97761 - protein, 9 aa, synthetic construct
  source 1..9: note = Seed: VVVGAGDVG (KRAS G13D)
YVVLATDVP

SEQ ID NO: 97762 - protein, 9 aa, synthetic construct
  source 1..9: note = Seed: VVVGAGDVG (KRAS G13D)
YVVLATDVQ

SEQ ID NO: 97763 - protein, 9 aa, synthetic construct
  source 1..9: note = Seed: VVVGAGDVG (KRAS G13D)
YVVLATDVR

SEQ ID NO: 97764 - protein, 9 aa, synthetic construct
  source 1..9: note = Seed: VVVGAGDVG (KRAS G13D)
YVVLATDVS

SEQ ID NO: 97765 - protein, 9 aa, synthetic construct
  source 1..9: note = Seed: VVVGAGDVG (KRAS G13D)
YVVLATDVT

SEQ ID NO: 97766 - protein, 9 aa, synthetic construct
  source 1..9: note = Seed: VVVGAGDVG (KRAS G13D)
YVVLATDVV

SEQ ID NO: 97767 - protein, 9 aa, synthetic construct
  source 1..9: note = Seed: VVVGAGDVG (KRAS G13D)
YVVLATDVW

SEQ ID NO: 97768 - protein, 9 aa, synthetic construct
  source 1..9: note = Seed: VVVGAGDVG (KRAS G13D)
YVVLATDVY

SEQ ID NO: 97769 - protein, 9 aa, synthetic construct
  source 1..9: note = Seed: VVVGAGDVG (KRAS G13D)
YVVLAVDVA

SEQ ID NO: 97770 - protein, 9 aa, synthetic construct
  source 1..9: note = Seed: VVVGAGDVG (KRAS G13D)
YVVLAVDVD

SEQ ID NO: 97771 - protein, 9 aa, synthetic construct
  source 1..9: note = Seed: VVVGAGDVG (KRAS G13D)
YVVLAVDVE

SEQ ID NO: 97772 - protein, 9 aa, synthetic construct
  source 1..9: note = Seed: VVVGAGDVG (KRAS G13D)
YVVLAVDVG

SEQ ID NO: 97773 - protein, 9 aa, synthetic construct
  source 1..9: note = Seed: VVVGAGDVG (KRAS G13D)
YVVLAVDVH

SEQ ID NO: 97774 - protein, 9 aa, synthetic construct
  source 1..9: note = Seed: VVVGAGDVG (KRAS G13D)
YVVLAVDVI

SEQ ID NO: 97775 - protein, 9 aa, synthetic construct
  source 1..9: note = Seed: VVVGAGDVG (KRAS G13D)
YVVLAVDVK

SEQ ID NO: 97776 - protein, 9 aa, synthetic construct
  source 1..9: note = Seed: VVVGAGDVG (KRAS G13D)
YVVLAVDVL

SEQ ID NO: 97777 - protein, 9 aa, synthetic construct
  source 1..9: note = Seed: VVVGAGDVG (KRAS G13D)
YVVLAVDVM

SEQ ID NO: 97778 - protein, 9 aa, synthetic construct
  source 1..9: note = Seed: VVVGAGDVG (KRAS G13D)
YVVLAVDVN

SEQ ID NO: 97779 - protein, 9 aa, synthetic construct
  source 1..9: note = Seed: VVVGAGDVG (KRAS G13D)
YVVLAVDVP

SEQ ID NO: 97780 - protein, 9 aa, synthetic construct
  source 1..9: note = Seed: VVVGAGDVG (KRAS G13D)
YVVLAVDVQ

SEQ ID NO: 97781 - protein, 9 aa, synthetic construct
  source 1..9: note = Seed: VVVGAGDVG (KRAS G13D)
YVVLAVDVR

SEQ ID NO: 97782 - protein, 9 aa, synthetic construct
  source 1..9: note = Seed: VVVGAGDVG (KRAS G13D)
YVVLAVDVS

SEQ ID NO: 97783 - protein, 9 aa, synthetic construct
  source 1..9: note = Seed: VVVGAGDVG (KRAS G13D)
YVVLAVDVT

SEQ ID NO: 97784 - protein, 9 aa, synthetic construct
  source 1..9: note = Seed: VVVGAGDVG (KRAS G13D)
YVVLAVDVV

SEQ ID NO: 97785 - protein, 9 aa, synthetic construct
  source 1..9: note = Seed: VVVGAGDVG (KRAS G13D)
YVVLAVDVY

SEQ ID NO: 97786 - protein, 9 aa, synthetic construct
  source 1..9: note = Seed: VVVGAGDVG (KRAS G13D)
YVVLAWDVA

SEQ ID NO: 97787 - protein, 9 aa, synthetic construct
  source 1..9: note = Seed: VVVGAGDVG (KRAS G13D)
YVVLAWDVH

SEQ ID NO: 97788 - protein, 9 aa, synthetic construct
  source 1..9: note = Seed: VVVGAGDVG (KRAS G13D)
YVVLAWDVN

SEQ ID NO: 97789 - protein, 9 aa, synthetic construct
  source 1..9: note = Seed: VVVGAGDVG (KRAS G13D)
YVVLAWDVS

SEQ ID NO: 97790 - protein, 9 aa, synthetic construct
  source 1..9: note = Seed: VVVGAGDVG (KRAS G13D)
YVVLAYDVA

SEQ ID NO: 97791 - protein, 9 aa, synthetic construct
  source 1..9: note = Seed: VVVGAGDVG (KRAS G13D)
YVVLAYDVH

SEQ ID NO: 97792 - protein, 9 aa, synthetic construct
  source 1..9: note = Seed: VVVGAGDVG (KRAS G13D)
YVVLAYDVN

SEQ ID NO: 97793 - protein, 9 aa, synthetic construct
  source 1..9: note = Seed: VVVGAGDVG (KRAS G13D)
YVVLAYDVS

SEQ ID NO: 97794 - protein, 9 aa, synthetic construct
  source 1..9: note = Seed: VVVGAGDVG (KRAS G13D)
YVVMAADVA

SEQ ID NO: 97795 - protein, 9 aa, synthetic construct
  source 1..9: note = Seed: VVVGAGDVG (KRAS G13D)
YVVMAADVC

SEQ ID NO: 97796 - protein, 9 aa, synthetic construct
  source 1..9: note = Seed: VVVGAGDVG (KRAS G13D)
YVVMAADVD

SEQ ID NO: 97797 - protein, 9 aa, synthetic construct
  source 1..9: note = Seed: VVVGAGDVG (KRAS G13D)
YVVMAADVE

SEQ ID NO: 97798 - protein, 9 aa, synthetic construct
  source 1..9: note = Seed: VVVGAGDVG (KRAS G13D)
YVVMAADVF

SEQ ID NO: 97799 - protein, 9 aa, synthetic construct
  source 1..9: note = Seed: VVVGAGDVG (KRAS G13D)
YVVMAADVG

SEQ ID NO: 97800 - protein, 9 aa, synthetic construct
  source 1..9: note = Seed: VVVGAGDVG (KRAS G13D)
YVVMAADVH

SEQ ID NO: 97801 - protein, 9 aa, synthetic construct
  source 1..9: note = Seed: VVVGAGDVG (KRAS G13D)
YVVMAADVI

SEQ ID NO: 97802 - protein, 9 aa, synthetic construct
  source 1..9: note = Seed: VVVGAGDVG (KRAS G13D)
YVVMAADVK

SEQ ID NO: 97803 - protein, 9 aa, synthetic construct
  source 1..9: note = Seed: VVVGAGDVG (KRAS G13D)
YVVMAADVL

SEQ ID NO: 97804 - protein, 9 aa, synthetic construct
  source 1..9: note = Seed: VVVGAGDVG (KRAS G13D)
YVVMAADVM

SEQ ID NO: 97805 - protein, 9 aa, synthetic construct
  source 1..9: note = Seed: VVVGAGDVG (KRAS G13D)
YVVMAADVN

SEQ ID NO: 97806 - protein, 9 aa, synthetic construct
  source 1..9: note = Seed: VVVGAGDVG (KRAS G13D)
YVVMAADVP

SEQ ID NO: 97807 - protein, 9 aa, synthetic construct
  source 1..9: note = Seed: VVVGAGDVG (KRAS G13D)
YVVMAADVQ

SEQ ID NO: 97808 - protein, 9 aa, synthetic construct
  source 1..9: note = Seed: VVVGAGDVG (KRAS G13D)
YVVMAADVR

SEQ ID NO: 97809 - protein, 9 aa, synthetic construct
  source 1..9: note = Seed: VVVGAGDVG (KRAS G13D)
YVVMAADVS

SEQ ID NO: 97810 - protein, 9 aa, synthetic construct
  source 1..9: note = Seed: VVVGAGDVG (KRAS G13D)
YVVMAADVT

SEQ ID NO: 97811 - protein, 9 aa, synthetic construct
  source 1..9: note = Seed: VVVGAGDVG (KRAS G13D)
YVVMAADVV

SEQ ID NO: 97812 - protein, 9 aa, synthetic construct
  source 1..9: note = Seed: VVVGAGDVG (KRAS G13D)
YVVMAADVW

SEQ ID NO: 97813 - protein, 9 aa, synthetic construct
  source 1..9: note = Seed: VVVGAGDVG (KRAS G13D)
YVVMAADVY

SEQ ID NO: 97814 - protein, 9 aa, synthetic construct
  source 1..9: note = Seed: VVVGAGDVG (KRAS G13D)
YVVMACDVA

SEQ ID NO: 97815 - protein, 9 aa, synthetic construct
  source 1..9: note = Seed: VVVGAGDVG (KRAS G13D)
YVVMACDVH

SEQ ID NO: 97816 - protein, 9 aa, synthetic construct
  source 1..9: note = Seed: VVVGAGDVG (KRAS G13D)
YVVMACDVN

SEQ ID NO: 97817 - protein, 9 aa, synthetic construct
  source 1..9: note = Seed: VVVGAGDVG (KRAS G13D)
YVVMACDVS

SEQ ID NO: 97818 - protein, 9 aa, synthetic construct
  source 1..9: note = Seed: VVVGAGDVG (KRAS G13D)
YVVMADDVA

SEQ ID NO: 97819 - protein, 9 aa, synthetic construct
  source 1..9: note = Seed: VVVGAGDVG (KRAS G13D)
YVVMADDVF

SEQ ID NO: 97820 - protein, 9 aa, synthetic construct
  source 1..9: note = Seed: VVVGAGDVG (KRAS G13D)
YVVMADDVG

SEQ ID NO: 97821 - protein, 9 aa, synthetic construct
  source 1..9: note = Seed: VVVGAGDVG (KRAS G13D)
YVVMADDVH

SEQ ID NO: 97822 - protein, 9 aa, synthetic construct
  source 1..9: note = Seed: VVVGAGDVG (KRAS G13D)
YVVMADDVI

SEQ ID NO: 97823 - protein, 9 aa, synthetic construct
  source 1..9: note = Seed: VVVGAGDVG (KRAS G13D)
YVVMADDVL

SEQ ID NO: 97824 - protein, 9 aa, synthetic construct
  source 1..9: note = Seed: VVVGAGDVG (KRAS G13D)
YVVMADDVM

SEQ ID NO: 97825 - protein, 9 aa, synthetic construct
  source 1..9: note = Seed: VVVGAGDVG (KRAS G13D)
YVVMADDVN

SEQ ID NO: 97826 - protein, 9 aa, synthetic construct
  source 1..9: note = Seed: VVVGAGDVG (KRAS G13D)
YVVMADDVQ

SEQ ID NO: 97827 - protein, 9 aa, synthetic construct
  source 1..9: note = Seed: VVVGAGDVG (KRAS G13D)
YVVMADDVR

SEQ ID NO: 97828 - protein, 9 aa, synthetic construct
  source 1..9: note = Seed: VVVGAGDVG (KRAS G13D)
YVVMADDVS

SEQ ID NO: 97829 - protein, 9 aa, synthetic construct
  source 1..9: note = Seed: VVVGAGDVG (KRAS G13D)
YVVMADDVT

SEQ ID NO: 97830 - protein, 9 aa, synthetic construct
  source 1..9: note = Seed: VVVGAGDVG (KRAS G13D)
YVVMADDVV

SEQ ID NO: 97831 - protein, 9 aa, synthetic construct
  source 1..9: note = Seed: VVVGAGDVG (KRAS G13D)
YVVMADDVY

SEQ ID NO: 97832 - protein, 9 aa, synthetic construct
  source 1..9: note = Seed: VVVGAGDVG (KRAS G13D)
YVVMAEDVA

SEQ ID NO: 97833 - protein, 9 aa, synthetic construct
  source 1..9: note = Seed: VVVGAGDVG (KRAS G13D)
YVVMAEDVE

SEQ ID NO: 97834 - protein, 9 aa, synthetic construct
  source 1..9: note = Seed: VVVGAGDVG (KRAS G13D)
YVVMAEDVF

SEQ ID NO: 97835 - protein, 9 aa, synthetic construct
  source 1..9: note = Seed: VVVGAGDVG (KRAS G13D)
YVVMAEDVG

SEQ ID NO: 97836 - protein, 9 aa, synthetic construct
  source 1..9: note = Seed: VVVGAGDVG (KRAS G13D)
YVVMAEDVH

SEQ ID NO: 97837 - protein, 9 aa, synthetic construct
  source 1..9: note = Seed: VVVGAGDVG (KRAS G13D)
YVVMAEDVI

SEQ ID NO: 97838 - protein, 9 aa, synthetic construct
  source 1..9: note = Seed: VVVGAGDVG (KRAS G13D)
YVVMAEDVK

SEQ ID NO: 97839 - protein, 9 aa, synthetic construct
  source 1..9: note = Seed: VVVGAGDVG (KRAS G13D)
YVVMAEDVL

SEQ ID NO: 97840 - protein, 9 aa, synthetic construct
  source 1..9: note = Seed: VVVGAGDVG (KRAS G13D)
YVVMAEDVM

SEQ ID NO: 97841 - protein, 9 aa, synthetic construct
  source 1..9: note = Seed: VVVGAGDVG (KRAS G13D)
YVVMAEDVN

SEQ ID NO: 97842 - protein, 9 aa, synthetic construct
  source 1..9: note = Seed: VVVGAGDVG (KRAS G13D)
YVVMAEDVP

SEQ ID NO: 97843 - protein, 9 aa, synthetic construct
  source 1..9: note = Seed: VVVGAGDVG (KRAS G13D)
YVVMAEDVQ

SEQ ID NO: 97844 - protein, 9 aa, synthetic construct
  source 1..9: note = Seed: VVVGAGDVG (KRAS G13D)
YVVMAEDVR

SEQ ID NO: 97845 - protein, 9 aa, synthetic construct
  source 1..9: note = Seed: VVVGAGDVG (KRAS G13D)
YVVMAEDVS

SEQ ID NO: 97846 - protein, 9 aa, synthetic construct
  source 1..9: note = Seed: VVVGAGDVG (KRAS G13D)
YVVMAEDVT

SEQ ID NO: 97847 - protein, 9 aa, synthetic construct
  source 1..9: note = Seed: VVVGAGDVG (KRAS G13D)
YVVMAEDVV

SEQ ID NO: 97848 - protein, 9 aa, synthetic construct
  source 1..9: note = Seed: VVVGAGDVG (KRAS G13D)
YVVMAEDVW

SEQ ID NO: 97849 - protein, 9 aa, synthetic construct
  source 1..9: note = Seed: VVVGAGDVG (KRAS G13D)
YVVMAEDVY

SEQ ID NO: 97850 - protein, 9 aa, synthetic construct
  source 1..9: note = Seed: VVVGAGDVG (KRAS G13D)
YVVMAFDVA

SEQ ID NO: 97851 - protein, 9 aa, synthetic construct
  source 1..9: note = Seed: VVVGAGDVG (KRAS G13D)
YVVMAFDVD

SEQ ID NO: 97852 - protein, 9 aa, synthetic construct
  source 1..9: note = Seed: VVVGAGDVG (KRAS G13D)
YVVMAFDVE

SEQ ID NO: 97853 - protein, 9 aa, synthetic construct
  source 1..9: note = Seed: VVVGAGDVG (KRAS G13D)
YVVMAFDVH

SEQ ID NO: 97854 - protein, 9 aa, synthetic construct
  source 1..9: note = Seed: VVVGAGDVG (KRAS G13D)
YVVMAFDVK

SEQ ID NO: 97855 - protein, 9 aa, synthetic construct
  source 1..9: note = Seed: VVVGAGDVG (KRAS G13D)
YVVMAFDVM

SEQ ID NO: 97856 - protein, 9 aa, synthetic construct
  source 1..9: note = Seed: VVVGAGDVG (KRAS G13D)
YVVMAFDVN

SEQ ID NO: 97857 - protein, 9 aa, synthetic construct
  source 1..9: note = Seed: VVVGAGDVG (KRAS G13D)
YVVMAFDVQ

SEQ ID NO: 97858 - protein, 9 aa, synthetic construct
  source 1..9: note = Seed: VVVGAGDVG (KRAS G13D)
YVVMAFDVR

SEQ ID NO: 97859 - protein, 9 aa, synthetic construct
  source 1..9: note = Seed: VVVGAGDVG (KRAS G13D)
YVVMAFDVS

SEQ ID NO: 97860 - protein, 9 aa, synthetic construct
  source 1..9: note = Seed: VVVGAGDVG (KRAS G13D)
YVVMAFDVT

SEQ ID NO: 97861 - protein, 9 aa, synthetic construct
  source 1..9: note = Seed: VVVGAGDVG (KRAS G13D)
YVVMAGDVA

SEQ ID NO: 97862 - protein, 9 aa, synthetic construct
  source 1..9: note = Seed: VVVGAGDVG (KRAS G13D)
YVVMAGDVC

SEQ ID NO: 97863 - protein, 9 aa, synthetic construct
  source 1..9: note = Seed: VVVGAGDVG (KRAS G13D)
YVVMAGDVD

SEQ ID NO: 97864 - protein, 9 aa, synthetic construct
  source 1..9: note = Seed: VVVGAGDVG (KRAS G13D)
YVVMAGDVE

SEQ ID NO: 97865 - protein, 9 aa, synthetic construct
  source 1..9: note = Seed: VVVGAGDVG (KRAS G13D)
YVVMAGDVF

SEQ ID NO: 97866 - protein, 9 aa, synthetic construct
  source 1..9: note = Seed: VVVGAGDVG (KRAS G13D)
YVVMAGDVG

SEQ ID NO: 97867 - protein, 9 aa, synthetic construct
  source 1..9: note = Seed: VVVGAGDVG (KRAS G13D)
YVVMAGDVH

SEQ ID NO: 97868 - protein, 9 aa, synthetic construct
  source 1..9: note = Seed: VVVGAGDVG (KRAS G13D)
YVVMAGDVI

SEQ ID NO: 97869 - protein, 9 aa, synthetic construct
  source 1..9: note = Seed: VVVGAGDVG (KRAS G13D)
YVVMAGDVK

SEQ ID NO: 97870 - protein, 9 aa, synthetic construct
  source 1..9: note = Seed: VVVGAGDVG (KRAS G13D)
YVVMAGDVL

SEQ ID NO: 97871 - protein, 9 aa, synthetic construct
  source 1..9: note = Seed: VVVGAGDVG (KRAS G13D)
YVVMAGDVM

SEQ ID NO: 97872 - protein, 9 aa, synthetic construct
  source 1..9: note = Seed: VVVGAGDVG (KRAS G13D)
YVVMAGDVN

SEQ ID NO: 97873 - protein, 9 aa, synthetic construct
  source 1..9: note = Seed: VVVGAGDVG (KRAS G13D)
YVVMAGDVP

SEQ ID NO: 97874 - protein, 9 aa, synthetic construct
  source 1..9: note = Seed: VVVGAGDVG (KRAS G13D)
YVVMAGDVQ

SEQ ID NO: 97875 - protein, 9 aa, synthetic construct
  source 1..9: note = Seed: VVVGAGDVG (KRAS G13D)
YVVMAGDVR

SEQ ID NO: 97876 - protein, 9 aa, synthetic construct
  source 1..9: note = Seed: VVVGAGDVG (KRAS G13D)
YVVMAGDVS

SEQ ID NO: 97877 - protein, 9 aa, synthetic construct
  source 1..9: note = Seed: VVVGAGDVG (KRAS G13D)
YVVMAGDVT

SEQ ID NO: 97878 - protein, 9 aa, synthetic construct
  source 1..9: note = Seed: VVVGAGDVG (KRAS G13D)
YVVMAGDVV

SEQ ID NO: 97879 - protein, 9 aa, synthetic construct
  source 1..9: note = Seed: VVVGAGDVG (KRAS G13D)
YVVMAGDVW

SEQ ID NO: 97880 - protein, 9 aa, synthetic construct
  source 1..9: note = Seed: VVVGAGDVG (KRAS G13D)
YVVMAGDVY

SEQ ID NO: 97881 - protein, 9 aa, synthetic construct
  source 1..9: note = Seed: VVVGAGDVG (KRAS G13D)
YVVMAHDVA

SEQ ID NO: 97882 - protein, 9 aa, synthetic construct
  source 1..9: note = Seed: VVVGAGDVG (KRAS G13D)
YVVMAHDVC

SEQ ID NO: 97883 - protein, 9 aa, synthetic construct
  source 1..9: note = Seed: VVVGAGDVG (KRAS G13D)
YVVMAHDVD

SEQ ID NO: 97884 - protein, 9 aa, synthetic construct
  source 1..9: note = Seed: VVVGAGDVG (KRAS G13D)
YVVMAHDVE

SEQ ID NO: 97885 - protein, 9 aa, synthetic construct
  source 1..9: note = Seed: VVVGAGDVG (KRAS G13D)
YVVMAHDVF

SEQ ID NO: 97886 - protein, 9 aa, synthetic construct
  source 1..9: note = Seed: VVVGAGDVG (KRAS G13D)
YVVMAHDVG

SEQ ID NO: 97887 - protein, 9 aa, synthetic construct
  source 1..9: note = Seed: VVVGAGDVG (KRAS G13D)
YVVMAHDVH

SEQ ID NO: 97888 - protein, 9 aa, synthetic construct
  source 1..9: note = Seed: VVVGAGDVG (KRAS G13D)
YVVMAHDVI

SEQ ID NO: 97889 - protein, 9 aa, synthetic construct
  source 1..9: note = Seed: VVVGAGDVG (KRAS G13D)
YVVMAHDVK

SEQ ID NO: 97890 - protein, 9 aa, synthetic construct
  source 1..9: note = Seed: VVVGAGDVG (KRAS G13D)
YVVMAHDVL

SEQ ID NO: 97891 - protein, 9 aa, synthetic construct
  source 1..9: note = Seed: VVVGAGDVG (KRAS G13D)
YVVMAHDVM

SEQ ID NO: 97892 - protein, 9 aa, synthetic construct
  source 1..9: note = Seed: VVVGAGDVG (KRAS G13D)
YVVMAHDVN

SEQ ID NO: 97893 - protein, 9 aa, synthetic construct
  source 1..9: note = Seed: VVVGAGDVG (KRAS G13D)
YVVMAHDVP

SEQ ID NO: 97894 - protein, 9 aa, synthetic construct
  source 1..9: note = Seed: VVVGAGDVG (KRAS G13D)
YVVMAHDVQ

SEQ ID NO: 97895 - protein, 9 aa, synthetic construct
  source 1..9: note = Seed: VVVGAGDVG (KRAS G13D)
YVVMAHDVR

SEQ ID NO: 97896 - protein, 9 aa, synthetic construct
  source 1..9: note = Seed: VVVGAGDVG (KRAS G13D)
YVVMAHDVS

SEQ ID NO: 97897 - protein, 9 aa, synthetic construct
  source 1..9: note = Seed: VVVGAGDVG (KRAS G13D)
YVVMAHDVT

SEQ ID NO: 97898 - protein, 9 aa, synthetic construct
  source 1..9: note = Seed: VVVGAGDVG (KRAS G13D)
YVVMAHDVV

SEQ ID NO: 97899 - protein, 9 aa, synthetic construct
  source 1..9: note = Seed: VVVGAGDVG (KRAS G13D)
YVVMAHDVW

SEQ ID NO: 97900 - protein, 9 aa, synthetic construct
  source 1..9: note = Seed: VVVGAGDVG (KRAS G13D)
YVVMAHDVY

SEQ ID NO: 97901 - protein, 9 aa, synthetic construct
  source 1..9: note = Seed: VVVGAGDVG (KRAS G13D)
YVVMAIDVA

SEQ ID NO: 97902 - protein, 9 aa, synthetic construct
  source 1..9: note = Seed: VVVGAGDVG (KRAS G13D)
YVVMAIDVC

SEQ ID NO: 97903 - protein, 9 aa, synthetic construct
  source 1..9: note = Seed: VVVGAGDVG (KRAS G13D)
YVVMAIDVD

SEQ ID NO: 97904 - protein, 9 aa, synthetic construct
  source 1..9: note = Seed: VVVGAGDVG (KRAS G13D)
YVVMAIDVE

SEQ ID NO: 97905 - protein, 9 aa, synthetic construct
  source 1..9: note = Seed: VVVGAGDVG (KRAS G13D)
YVVMAIDVF

SEQ ID NO: 97906 - protein, 9 aa, synthetic construct
  source 1..9: note = Seed: VVVGAGDVG (KRAS G13D)
YVVMAIDVG

SEQ ID NO: 97907 - protein, 9 aa, synthetic construct
  source 1..9: note = Seed: VVVGAGDVG (KRAS G13D)
YVVMAIDVH

SEQ ID NO: 97908 - protein, 9 aa, synthetic construct
  source 1..9: note = Seed: VVVGAGDVG (KRAS G13D)
YVVMAIDVI

SEQ ID NO: 97909 - protein, 9 aa, synthetic construct
  source 1..9: note = Seed: VVVGAGDVG (KRAS G13D)
YVVMAIDVK

SEQ ID NO: 97910 - protein, 9 aa, synthetic construct
  source 1..9: note = Seed: VVVGAGDVG (KRAS G13D)
YVVMAIDVL

SEQ ID NO: 97911 - protein, 9 aa, synthetic construct
  source 1..9: note = Seed: VVVGAGDVG (KRAS G13D)
YVVMAIDVM

SEQ ID NO: 97912 - protein, 9 aa, synthetic construct
  source 1..9: note = Seed: VVVGAGDVG (KRAS G13D)
YVVMAIDVN

SEQ ID NO: 97913 - protein, 9 aa, synthetic construct
  source 1..9: note = Seed: VVVGAGDVG (KRAS G13D)
YVVMAIDVP

SEQ ID NO: 97914 - protein, 9 aa, synthetic construct
  source 1..9: note = Seed: VVVGAGDVG (KRAS G13D)
YVVMAIDVQ

SEQ ID NO: 97915 - protein, 9 aa, synthetic construct
  source 1..9: note = Seed: VVVGAGDVG (KRAS G13D)
YVVMAIDVR

SEQ ID NO: 97916 - protein, 9 aa, synthetic construct
  source 1..9: note = Seed: VVVGAGDVG (KRAS G13D)
YVVMAIDVS

SEQ ID NO: 97917 - protein, 9 aa, synthetic construct
  source 1..9: note = Seed: VVVGAGDVG (KRAS G13D)
YVVMAIDVT

SEQ ID NO: 97918 - protein, 9 aa, synthetic construct
  source 1..9: note = Seed: VVVGAGDVG (KRAS G13D)
YVVMAIDVV

SEQ ID NO: 97919 - protein, 9 aa, synthetic construct
  source 1..9: note = Seed: VVVGAGDVG (KRAS G13D)
YVVMAIDVY

SEQ ID NO: 97920 - protein, 9 aa, synthetic construct
  source 1..9: note = Seed: VVVGAGDVG (KRAS G13D)
YVVMAKDVA

SEQ ID NO: 97921 - protein, 9 aa, synthetic construct
  source 1..9: note = Seed: VVVGAGDVG (KRAS G13D)
YVVMAKDVF

SEQ ID NO: 97922 - protein, 9 aa, synthetic construct
  source 1..9: note = Seed: VVVGAGDVG (KRAS G13D)
YVVMAKDVH

SEQ ID NO: 97923 - protein, 9 aa, synthetic construct
  source 1..9: note = Seed: VVVGAGDVG (KRAS G13D)
YVVMAKDVI

SEQ ID NO: 97924 - protein, 9 aa, synthetic construct
  source 1..9: note = Seed: VVVGAGDVG (KRAS G13D)
YVVMAKDVL

SEQ ID NO: 97925 - protein, 9 aa, synthetic construct
  source 1..9: note = Seed: VVVGAGDVG (KRAS G13D)
YVVMAKDVM

SEQ ID NO: 97926 - protein, 9 aa, synthetic construct
  source 1..9: note = Seed: VVVGAGDVG (KRAS G13D)
YVVMAKDVN

SEQ ID NO: 97927 - protein, 9 aa, synthetic construct
  source 1..9: note = Seed: VVVGAGDVG (KRAS G13D)
YVVMAKDVR

SEQ ID NO: 97928 - protein, 9 aa, synthetic construct
  source 1..9: note = Seed: VVVGAGDVG (KRAS G13D)
YVVMAKDVS

SEQ ID NO: 97929 - protein, 9 aa, synthetic construct
  source 1..9: note = Seed: VVVGAGDVG (KRAS G13D)
YVVMAKDVT

SEQ ID NO: 97930 - protein, 9 aa, synthetic construct
  source 1..9: note = Seed: VVVGAGDVG (KRAS G13D)
YVVMAKDVV

SEQ ID NO: 97931 - protein, 9 aa, synthetic construct
  source 1..9: note = Seed: VVVGAGDVG (KRAS G13D)
YVVMALDVA

SEQ ID NO: 97932 - protein, 9 aa, synthetic construct
  source 1..9: note = Seed: VVVGAGDVG (KRAS G13D)
YVVMALDVC

SEQ ID NO: 97933 - protein, 9 aa, synthetic construct
  source 1..9: note = Seed: VVVGAGDVG (KRAS G13D)
YVVMALDVD

SEQ ID NO: 97934 - protein, 9 aa, synthetic construct
  source 1..9: note = Seed: VVVGAGDVG (KRAS G13D)
YVVMALDVE

SEQ ID NO: 97935 - protein, 9 aa, synthetic construct
  source 1..9: note = Seed: VVVGAGDVG (KRAS G13D)
YVVMALDVG

SEQ ID NO: 97936 - protein, 9 aa, synthetic construct
  source 1..9: note = Seed: VVVGAGDVG (KRAS G13D)
YVVMALDVH

SEQ ID NO: 97937 - protein, 9 aa, synthetic construct
  source 1..9: note = Seed: VVVGAGDVG (KRAS G13D)
YVVMALDVK

SEQ ID NO: 97938 - protein, 9 aa, synthetic construct
  source 1..9: note = Seed: VVVGAGDVG (KRAS G13D)
YVVMALDVL

SEQ ID NO: 97939 - protein, 9 aa, synthetic construct
  source 1..9: note = Seed: VVVGAGDVG (KRAS G13D)
YVVMALDVM

SEQ ID NO: 97940 - protein, 9 aa, synthetic construct
  source 1..9: note = Seed: VVVGAGDVG (KRAS G13D)
YVVMALDVN

SEQ ID NO: 97941 - protein, 9 aa, synthetic construct
  source 1..9: note = Seed: VVVGAGDVG (KRAS G13D)
YVVMALDVQ

SEQ ID NO: 97942 - protein, 9 aa, synthetic construct
  source 1..9: note = Seed: VVVGAGDVG (KRAS G13D)
YVVMALDVR

SEQ ID NO: 97943 - protein, 9 aa, synthetic construct
  source 1..9: note = Seed: VVVGAGDVG (KRAS G13D)
YVVMALDVS

SEQ ID NO: 97944 - protein, 9 aa, synthetic construct
  source 1..9: note = Seed: VVVGAGDVG (KRAS G13D)
YVVMALDVT

SEQ ID NO: 97945 - protein, 9 aa, synthetic construct
  source 1..9: note = Seed: VVVGAGDVG (KRAS G13D)
YVVMALDVV

SEQ ID NO: 97946 - protein, 9 aa, synthetic construct
  source 1..9: note = Seed: VVVGAGDVG (KRAS G13D)
YVVMAMDVA

SEQ ID NO: 97947 - protein, 9 aa, synthetic construct
  source 1..9: note = Seed: VVVGAGDVG (KRAS G13D)
YVVMAMDVC

SEQ ID NO: 97948 - protein, 9 aa, synthetic construct
  source 1..9: note = Seed: VVVGAGDVG (KRAS G13D)
YVVMAMDVD

SEQ ID NO: 97949 - protein, 9 aa, synthetic construct
  source 1..9: note = Seed: VVVGAGDVG (KRAS G13D)
YVVMAMDVE

SEQ ID NO: 97950 - protein, 9 aa, synthetic construct
  source 1..9: note = Seed: VVVGAGDVG (KRAS G13D)
YVVMAMDVG

SEQ ID NO: 97951 - protein, 9 aa, synthetic construct
  source 1..9: note = Seed: VVVGAGDVG (KRAS G13D)
YVVMAMDVH

SEQ ID NO: 97952 - protein, 9 aa, synthetic construct
  source 1..9: note = Seed: VVVGAGDVG (KRAS G13D)
YVVMAMDVM

SEQ ID NO: 97953 - protein, 9 aa, synthetic construct
  source 1..9: note = Seed: VVVGAGDVG (KRAS G13D)
YVVMAMDVN

SEQ ID NO: 97954 - protein, 9 aa, synthetic construct
  source 1..9: note = Seed: VVVGAGDVG (KRAS G13D)
YVVMAMDVQ

SEQ ID NO: 97955 - protein, 9 aa, synthetic construct
  source 1..9: note = Seed: VVVGAGDVG (KRAS G13D)
YVVMAMDVS

SEQ ID NO: 97956 - protein, 9 aa, synthetic construct
  source 1..9: note = Seed: VVVGAGDVG (KRAS G13D)
YVVMAMDVT

SEQ ID NO: 97957 - protein, 9 aa, synthetic construct
  source 1..9: note = Seed: VVVGAGDVG (KRAS G13D)
YVVMANDVA

SEQ ID NO: 97958 - protein, 9 aa, synthetic construct
  source 1..9: note = Seed: VVVGAGDVG (KRAS G13D)
YVVMANDVC

SEQ ID NO: 97959 - protein, 9 aa, synthetic construct
  source 1..9: note = Seed: VVVGAGDVG (KRAS G13D)
YVVMANDVD

SEQ ID NO: 97960 - protein, 9 aa, synthetic construct
  source 1..9: note = Seed: VVVGAGDVG (KRAS G13D)
YVVMANDVE

SEQ ID NO: 97961 - protein, 9 aa, synthetic construct
  source 1..9: note = Seed: VVVGAGDVG (KRAS G13D)
YVVMANDVF

SEQ ID NO: 97962 - protein, 9 aa, synthetic construct
  source 1..9: note = Seed: VVVGAGDVG (KRAS G13D)
YVVMANDVG

SEQ ID NO: 97963 - protein, 9 aa, synthetic construct
  source 1..9: note = Seed: VVVGAGDVG (KRAS G13D)
YVVMANDVH

SEQ ID NO: 97964 - protein, 9 aa, synthetic construct
  source 1..9: note = Seed: VVVGAGDVG (KRAS G13D)
YVVMANDVI

SEQ ID NO: 97965 - protein, 9 aa, synthetic construct
  source 1..9: note = Seed: VVVGAGDVG (KRAS G13D)
YVVMANDVK

SEQ ID NO: 97966 - protein, 9 aa, synthetic construct
  source 1..9: note = Seed: VVVGAGDVG (KRAS G13D)
YVVMANDVL

SEQ ID NO: 97967 - protein, 9 aa, synthetic construct
  source 1..9: note = Seed: VVVGAGDVG (KRAS G13D)
YVVMANDVM

SEQ ID NO: 97968 - protein, 9 aa, synthetic construct
  source 1..9: note = Seed: VVVGAGDVG (KRAS G13D)
YVVMANDVN

SEQ ID NO: 97969 - protein, 9 aa, synthetic construct
  source 1..9: note = Seed: VVVGAGDVG (KRAS G13D)
YVVMANDVP

SEQ ID NO: 97970 - protein, 9 aa, synthetic construct
  source 1..9: note = Seed: VVVGAGDVG (KRAS G13D)
YVVMANDVQ

SEQ ID NO: 97971 - protein, 9 aa, synthetic construct
  source 1..9: note = Seed: VVVGAGDVG (KRAS G13D)
YVVMANDVR

SEQ ID NO: 97972 - protein, 9 aa, synthetic construct
  source 1..9: note = Seed: VVVGAGDVG (KRAS G13D)
YVVMANDVS

SEQ ID NO: 97973 - protein, 9 aa, synthetic construct
  source 1..9: note = Seed: VVVGAGDVG (KRAS G13D)
YVVMANDVT

SEQ ID NO: 97974 - protein, 9 aa, synthetic construct
  source 1..9: note = Seed: VVVGAGDVG (KRAS G13D)
YVVMANDVV

SEQ ID NO: 97975 - protein, 9 aa, synthetic construct
  source 1..9: note = Seed: VVVGAGDVG (KRAS G13D)
YVVMANDVW

SEQ ID NO: 97976 - protein, 9 aa, synthetic construct
  source 1..9: note = Seed: VVVGAGDVG (KRAS G13D)
YVVMANDVY

SEQ ID NO: 97977 - protein, 9 aa, synthetic construct
  source 1..9: note = Seed: VVVGAGDVG (KRAS G13D)
YVVMAPDVA

SEQ ID NO: 97978 - protein, 9 aa, synthetic construct
  source 1..9: note = Seed: VVVGAGDVG (KRAS G13D)
YVVMAPDVC

SEQ ID NO: 97979 - protein, 9 aa, synthetic construct
  source 1..9: note = Seed: VVVGAGDVG (KRAS G13D)
YVVMAPDVD

SEQ ID NO: 97980 - protein, 9 aa, synthetic construct
  source 1..9: note = Seed: VVVGAGDVG (KRAS G13D)
YVVMAPDVE

SEQ ID NO: 97981 - protein, 9 aa, synthetic construct
  source 1..9: note = Seed: VVVGAGDVG (KRAS G13D)
YVVMAPDVF

SEQ ID NO: 97982 - protein, 9 aa, synthetic construct
  source 1..9: note = Seed: VVVGAGDVG (KRAS G13D)
YVVMAPDVG

SEQ ID NO: 97983 - protein, 9 aa, synthetic construct
  source 1..9: note = Seed: VVVGAGDVG (KRAS G13D)
YVVMAPDVH

SEQ ID NO: 97984 - protein, 9 aa, synthetic construct
  source 1..9: note = Seed: VVVGAGDVG (KRAS G13D)
YVVMAPDVI

SEQ ID NO: 97985 - protein, 9 aa, synthetic construct
  source 1..9: note = Seed: VVVGAGDVG (KRAS G13D)
YVVMAPDVK

SEQ ID NO: 97986 - protein, 9 aa, synthetic construct
  source 1..9: note = Seed: VVVGAGDVG (KRAS G13D)
YVVMAPDVL

SEQ ID NO: 97987 - protein, 9 aa, synthetic construct
  source 1..9: note = Seed: VVVGAGDVG (KRAS G13D)
YVVMAPDVM

SEQ ID NO: 97988 - protein, 9 aa, synthetic construct
  source 1..9: note = Seed: VVVGAGDVG (KRAS G13D)
YVVMAPDVN

SEQ ID NO: 97989 - protein, 9 aa, synthetic construct
  source 1..9: note = Seed: VVVGAGDVG (KRAS G13D)
YVVMAPDVP

SEQ ID NO: 97990 - protein, 9 aa, synthetic construct
  source 1..9: note = Seed: VVVGAGDVG (KRAS G13D)
YVVMAPDVQ

SEQ ID NO: 97991 - protein, 9 aa, synthetic construct
  source 1..9: note = Seed: VVVGAGDVG (KRAS G13D)
YVVMAPDVR

SEQ ID NO: 97992 - protein, 9 aa, synthetic construct
  source 1..9: note = Seed: VVVGAGDVG (KRAS G13D)
YVVMAPDVS

SEQ ID NO: 97993 - protein, 9 aa, synthetic construct
  source 1..9: note = Seed: VVVGAGDVG (KRAS G13D)
YVVMAPDVT

SEQ ID NO: 97994 - protein, 9 aa, synthetic construct
  source 1..9: note = Seed: VVVGAGDVG (KRAS G13D)
YVVMAPDVV

SEQ ID NO: 97995 - protein, 9 aa, synthetic construct
  source 1..9: note = Seed: VVVGAGDVG (KRAS G13D)
YVVMAPDVW

SEQ ID NO: 97996 - protein, 9 aa, synthetic construct
  source 1..9: note = Seed: VVVGAGDVG (KRAS G13D)
YVVMAPDVY

SEQ ID NO: 97997 - protein, 9 aa, synthetic construct
  source 1..9: note = Seed: VVVGAGDVG (KRAS G13D)
YVVMAQDVA

SEQ ID NO: 97998 - protein, 9 aa, synthetic construct
  source 1..9: note = Seed: VVVGAGDVG (KRAS G13D)
YVVMAQDVC

SEQ ID NO: 97999 - protein, 9 aa, synthetic construct
  source 1..9: note = Seed: VVVGAGDVG (KRAS G13D)
YVVMAQDVD

SEQ ID NO: 98000 - protein, 9 aa, synthetic construct
  source 1..9: note = Seed: VVVGAGDVG (KRAS G13D)
YVVMAQDVE

SEQ ID NO: 98001 - protein, 9 aa, synthetic construct
  source 1..9: note = Seed: VVVGAGDVG (KRAS G13D)
YVVMAQDVF

SEQ ID NO: 98002 - protein, 9 aa, synthetic construct
  source 1..9: note = Seed: VVVGAGDVG (KRAS G13D)
YVVMAQDVG

SEQ ID NO: 98003 - protein, 9 aa, synthetic construct
  source 1..9: note = Seed: VVVGAGDVG (KRAS G13D)
YVVMAQDVH

SEQ ID NO: 98004 - protein, 9 aa, synthetic construct
  source 1..9: note = Seed: VVVGAGDVG (KRAS G13D)
YVVMAQDVI

SEQ ID NO: 98005 - protein, 9 aa, synthetic construct
  source 1..9: note = Seed: VVVGAGDVG (KRAS G13D)
YVVMAQDVK

SEQ ID NO: 98006 - protein, 9 aa, synthetic construct
  source 1..9: note = Seed: VVVGAGDVG (KRAS G13D)
YVVMAQDVL

SEQ ID NO: 98007 - protein, 9 aa, synthetic construct
  source 1..9: note = Seed: VVVGAGDVG (KRAS G13D)
YVVMAQDVM

SEQ ID NO: 98008 - protein, 9 aa, synthetic construct
  source 1..9: note = Seed: VVVGAGDVG (KRAS G13D)
YVVMAQDVN

SEQ ID NO: 98009 - protein, 9 aa, synthetic construct
  source 1..9: note = Seed: VVVGAGDVG (KRAS G13D)
YVVMAQDVP

SEQ ID NO: 98010 - protein, 9 aa, synthetic construct
  source 1..9: note = Seed: VVVGAGDVG (KRAS G13D)
YVVMAQDVQ

SEQ ID NO: 98011 - protein, 9 aa, synthetic construct
  source 1..9: note = Seed: VVVGAGDVG (KRAS G13D)
YVVMAQDVR

SEQ ID NO: 98012 - protein, 9 aa, synthetic construct
  source 1..9: note = Seed: VVVGAGDVG (KRAS G13D)
YVVMAQDVS

SEQ ID NO: 98013 - protein, 9 aa, synthetic construct
  source 1..9: note = Seed: VVVGAGDVG (KRAS G13D)
YVVMAQDVT

SEQ ID NO: 98014 - protein, 9 aa, synthetic construct
  source 1..9: note = Seed: VVVGAGDVG (KRAS G13D)
YVVMAQDVV

SEQ ID NO: 98015 - protein, 9 aa, synthetic construct
  source 1..9: note = Seed: VVVGAGDVG (KRAS G13D)
YVVMAQDVY

SEQ ID NO: 98016 - protein, 9 aa, synthetic construct
  source 1..9: note = Seed: VVVGAGDVG (KRAS G13D)
YVVMARDVA

SEQ ID NO: 98017 - protein, 9 aa, synthetic construct
  source 1..9: note = Seed: VVVGAGDVG (KRAS G13D)
YVVMARDVD

SEQ ID NO: 98018 - protein, 9 aa, synthetic construct
  source 1..9: note = Seed: VVVGAGDVG (KRAS G13D)
YVVMARDVE

SEQ ID NO: 98019 - protein, 9 aa, synthetic construct
  source 1..9: note = Seed: VVVGAGDVG (KRAS G13D)
YVVMARDVF

SEQ ID NO: 98020 - protein, 9 aa, synthetic construct
  source 1..9: note = Seed: VVVGAGDVG (KRAS G13D)
YVVMARDVG

SEQ ID NO: 98021 - protein, 9 aa, synthetic construct
  source 1..9: note = Seed: VVVGAGDVG (KRAS G13D)
YVVMARDVH

SEQ ID NO: 98022 - protein, 9 aa, synthetic construct
  source 1..9: note = Seed: VVVGAGDVG (KRAS G13D)
YVVMARDVI

SEQ ID NO: 98023 - protein, 9 aa, synthetic construct
  source 1..9: note = Seed: VVVGAGDVG (KRAS G13D)
YVVMARDVL

SEQ ID NO: 98024 - protein, 9 aa, synthetic construct
  source 1..9: note = Seed: VVVGAGDVG (KRAS G13D)
YVVMARDVM

SEQ ID NO: 98025 - protein, 9 aa, synthetic construct
  source 1..9: note = Seed: VVVGAGDVG (KRAS G13D)
YVVMARDVN

SEQ ID NO: 98026 - protein, 9 aa, synthetic construct
  source 1..9: note = Seed: VVVGAGDVG (KRAS G13D)
YVVMARDVQ

SEQ ID NO: 98027 - protein, 9 aa, synthetic construct
  source 1..9: note = Seed: VVVGAGDVG (KRAS G13D)
YVVMARDVR

SEQ ID NO: 98028 - protein, 9 aa, synthetic construct
  source 1..9: note = Seed: VVVGAGDVG (KRAS G13D)
YVVMARDVS

SEQ ID NO: 98029 - protein, 9 aa, synthetic construct
  source 1..9: note = Seed: VVVGAGDVG (KRAS G13D)
YVVMARDVT

SEQ ID NO: 98030 - protein, 9 aa, synthetic construct
  source 1..9: note = Seed: VVVGAGDVG (KRAS G13D)
YVVMARDVV

SEQ ID NO: 98031 - protein, 9 aa, synthetic construct
  source 1..9: note = Seed: VVVGAGDVG (KRAS G13D)
YVVMARDVY

SEQ ID NO: 98032 - protein, 9 aa, synthetic construct
  source 1..9: note = Seed: VVVGAGDVG (KRAS G13D)
YVVMASDVA

SEQ ID NO: 98033 - protein, 9 aa, synthetic construct
  source 1..9: note = Seed: VVVGAGDVG (KRAS G13D)
YVVMASDVC

SEQ ID NO: 98034 - protein, 9 aa, synthetic construct
  source 1..9: note = Seed: VVVGAGDVG (KRAS G13D)
YVVMASDVD

SEQ ID NO: 98035 - protein, 9 aa, synthetic construct
  source 1..9: note = Seed: VVVGAGDVG (KRAS G13D)
YVVMASDVE

SEQ ID NO: 98036 - protein, 9 aa, synthetic construct
  source 1..9: note = Seed: VVVGAGDVG (KRAS G13D)
YVVMASDVF

SEQ ID NO: 98037 - protein, 9 aa, synthetic construct
  source 1..9: note = Seed: VVVGAGDVG (KRAS G13D)
YVVMASDVG

SEQ ID NO: 98038 - protein, 9 aa, synthetic construct
  source 1..9: note = Seed: VVVGAGDVG (KRAS G13D)
YVVMASDVH

SEQ ID NO: 98039 - protein, 9 aa, synthetic construct
  source 1..9: note = Seed: VVVGAGDVG (KRAS G13D)
YVVMASDVI

SEQ ID NO: 98040 - protein, 9 aa, synthetic construct
  source 1..9: note = Seed: VVVGAGDVG (KRAS G13D)
YVVMASDVK

SEQ ID NO: 98041 - protein, 9 aa, synthetic construct
  source 1..9: note = Seed: VVVGAGDVG (KRAS G13D)
YVVMASDVL

SEQ ID NO: 98042 - protein, 9 aa, synthetic construct
  source 1..9: note = Seed: VVVGAGDVG (KRAS G13D)
YVVMASDVM

SEQ ID NO: 98043 - protein, 9 aa, synthetic construct
  source 1..9: note = Seed: VVVGAGDVG (KRAS G13D)
YVVMASDVN

SEQ ID NO: 98044 - protein, 9 aa, synthetic construct
  source 1..9: note = Seed: VVVGAGDVG (KRAS G13D)
YVVMASDVP

SEQ ID NO: 98045 - protein, 9 aa, synthetic construct
  source 1..9: note = Seed: VVVGAGDVG (KRAS G13D)
YVVMASDVQ

SEQ ID NO: 98046 - protein, 9 aa, synthetic construct
  source 1..9: note = Seed: VVVGAGDVG (KRAS G13D)
YVVMASDVR

SEQ ID NO: 98047 - protein, 9 aa, synthetic construct
  source 1..9: note = Seed: VVVGAGDVG (KRAS G13D)
YVVMASDVS

SEQ ID NO: 98048 - protein, 9 aa, synthetic construct
  source 1..9: note = Seed: VVVGAGDVG (KRAS G13D)
YVVMASDVT

SEQ ID NO: 98049 - protein, 9 aa, synthetic construct
  source 1..9: note = Seed: VVVGAGDVG (KRAS G13D)
YVVMASDVV

SEQ ID NO: 98050 - protein, 9 aa, synthetic construct
  source 1..9: note = Seed: VVVGAGDVG (KRAS G13D)
YVVMASDVW

SEQ ID NO: 98051 - protein, 9 aa, synthetic construct
  source 1..9: note = Seed: VVVGAGDVG (KRAS G13D)
YVVMASDVY

SEQ ID NO: 98052 - protein, 9 aa, synthetic construct
  source 1..9: note = Seed: VVVGAGDVG (KRAS G13D)
YVVMATDVA

SEQ ID NO: 98053 - protein, 9 aa, synthetic construct
  source 1..9: note = Seed: VVVGAGDVG (KRAS G13D)
YVVMATDVC

SEQ ID NO: 98054 - protein, 9 aa, synthetic construct
  source 1..9: note = Seed: VVVGAGDVG (KRAS G13D)
YVVMATDVD

SEQ ID NO: 98055 - protein, 9 aa, synthetic construct
  source 1..9: note = Seed: VVVGAGDVG (KRAS G13D)
YVVMATDVE

SEQ ID NO: 98056 - protein, 9 aa, synthetic construct
  source 1..9: note = Seed: VVVGAGDVG (KRAS G13D)
YVVMATDVF

SEQ ID NO: 98057 - protein, 9 aa, synthetic construct
  source 1..9: note = Seed: VVVGAGDVG (KRAS G13D)
YVVMATDVG

SEQ ID NO: 98058 - protein, 9 aa, synthetic construct
  source 1..9: note = Seed: VVVGAGDVG (KRAS G13D)
YVVMATDVH

SEQ ID NO: 98059 - protein, 9 aa, synthetic construct
  source 1..9: note = Seed: VVVGAGDVG (KRAS G13D)
YVVMATDVI

SEQ ID NO: 98060 - protein, 9 aa, synthetic construct
  source 1..9: note = Seed: VVVGAGDVG (KRAS G13D)
YVVMATDVK

SEQ ID NO: 98061 - protein, 9 aa, synthetic construct
  source 1..9: note = Seed: VVVGAGDVG (KRAS G13D)
YVVMATDVL

SEQ ID NO: 98062 - protein, 9 aa, synthetic construct
  source 1..9: note = Seed: VVVGAGDVG (KRAS G13D)
YVVMATDVM

SEQ ID NO: 98063 - protein, 9 aa, synthetic construct
  source 1..9: note = Seed: VVVGAGDVG (KRAS G13D)
YVVMATDVN

SEQ ID NO: 98064 - protein, 9 aa, synthetic construct
  source 1..9: note = Seed: VVVGAGDVG (KRAS G13D)
YVVMATDVP

SEQ ID NO: 98065 - protein, 9 aa, synthetic construct
  source 1..9: note = Seed: VVVGAGDVG (KRAS G13D)
YVVMATDVQ

SEQ ID NO: 98066 - protein, 9 aa, synthetic construct
  source 1..9: note = Seed: VVVGAGDVG (KRAS G13D)
YVVMATDVR

SEQ ID NO: 98067 - protein, 9 aa, synthetic construct
  source 1..9: note = Seed: VVVGAGDVG (KRAS G13D)
YVVMATDVS

SEQ ID NO: 98068 - protein, 9 aa, synthetic construct
  source 1..9: note = Seed: VVVGAGDVG (KRAS G13D)
YVVMATDVT

SEQ ID NO: 98069 - protein, 9 aa, synthetic construct
  source 1..9: note = Seed: VVVGAGDVG (KRAS G13D)
YVVMATDVV

SEQ ID NO: 98070 - protein, 9 aa, synthetic construct
  source 1..9: note = Seed: VVVGAGDVG (KRAS G13D)
YVVMATDVW

SEQ ID NO: 98071 - protein, 9 aa, synthetic construct
  source 1..9: note = Seed: VVVGAGDVG (KRAS G13D)
YVVMATDVY

SEQ ID NO: 98072 - protein, 9 aa, synthetic construct
  source 1..9: note = Seed: VVVGAGDVG (KRAS G13D)
YVVMAVDVA

SEQ ID NO: 98073 - protein, 9 aa, synthetic construct
  source 1..9: note = Seed: VVVGAGDVG (KRAS G13D)
YVVMAVDVC

SEQ ID NO: 98074 - protein, 9 aa, synthetic construct
  source 1..9: note = Seed: VVVGAGDVG (KRAS G13D)
YVVMAVDVD

SEQ ID NO: 98075 - protein, 9 aa, synthetic construct
  source 1..9: note = Seed: VVVGAGDVG (KRAS G13D)
YVVMAVDVE

SEQ ID NO: 98076 - protein, 9 aa, synthetic construct
  source 1..9: note = Seed: VVVGAGDVG (KRAS G13D)
YVVMAVDVF

SEQ ID NO: 98077 - protein, 9 aa, synthetic construct
  source 1..9: note = Seed: VVVGAGDVG (KRAS G13D)
YVVMAVDVG

SEQ ID NO: 98078 - protein, 9 aa, synthetic construct
  source 1..9: note = Seed: VVVGAGDVG (KRAS G13D)
YVVMAVDVH

SEQ ID NO: 98079 - protein, 9 aa, synthetic construct
  source 1..9: note = Seed: VVVGAGDVG (KRAS G13D)
YVVMAVDVI

SEQ ID NO: 98080 - protein, 9 aa, synthetic construct
  source 1..9: note = Seed: VVVGAGDVG (KRAS G13D)
YVVMAVDVK

SEQ ID NO: 98081 - protein, 9 aa, synthetic construct
  source 1..9: note = Seed: VVVGAGDVG (KRAS G13D)
YVVMAVDVL

SEQ ID NO: 98082 - protein, 9 aa, synthetic construct
  source 1..9: note = Seed: VVVGAGDVG (KRAS G13D)
YVVMAVDVM

SEQ ID NO: 98083 - protein, 9 aa, synthetic construct
  source 1..9: note = Seed: VVVGAGDVG (KRAS G13D)
YVVMAVDVN

SEQ ID NO: 98084 - protein, 9 aa, synthetic construct
  source 1..9: note = Seed: VVVGAGDVG (KRAS G13D)
YVVMAVDVP

SEQ ID NO: 98085 - protein, 9 aa, synthetic construct
  source 1..9: note = Seed: VVVGAGDVG (KRAS G13D)
YVVMAVDVQ

SEQ ID NO: 98086 - protein, 9 aa, synthetic construct
  source 1..9: note = Seed: VVVGAGDVG (KRAS G13D)
YVVMAVDVR

SEQ ID NO: 98087 - protein, 9 aa, synthetic construct
  source 1..9: note = Seed: VVVGAGDVG (KRAS G13D)
YVVMAVDVS

SEQ ID NO: 98088 - protein, 9 aa, synthetic construct
  source 1..9: note = Seed: VVVGAGDVG (KRAS G13D)
YVVMAVDVT

SEQ ID NO: 98089 - protein, 9 aa, synthetic construct
  source 1..9: note = Seed: VVVGAGDVG (KRAS G13D)
YVVMAVDVV

SEQ ID NO: 98090 - protein, 9 aa, synthetic construct
  source 1..9: note = Seed: VVVGAGDVG (KRAS G13D)
YVVMAVDVY

SEQ ID NO: 98091 - protein, 9 aa, synthetic construct
  source 1..9: note = Seed: VVVGAGDVG (KRAS G13D)
YVVMAWDVA

SEQ ID NO: 98092 - protein, 9 aa, synthetic construct
  source 1..9: note = Seed: VVVGAGDVG (KRAS G13D)
YVVMAWDVH

SEQ ID NO: 98093 - protein, 9 aa, synthetic construct
  source 1..9: note = Seed: VVVGAGDVG (KRAS G13D)
YVVMAWDVM

SEQ ID NO: 98094 - protein, 9 aa, synthetic construct
  source 1..9: note = Seed: VVVGAGDVG (KRAS G13D)
YVVMAWDVN

SEQ ID NO: 98095 - protein, 9 aa, synthetic construct
  source 1..9: note = Seed: VVVGAGDVG (KRAS G13D)
YVVMAWDVS

SEQ ID NO: 98096 - protein, 9 aa, synthetic construct
  source 1..9: note = Seed: VVVGAGDVG (KRAS G13D)
YVVMAYDVA

SEQ ID NO: 98097 - protein, 9 aa, synthetic construct
  source 1..9: note = Seed: VVVGAGDVG (KRAS G13D)
YVVMAYDVH

SEQ ID NO: 98098 - protein, 9 aa, synthetic construct
  source 1..9: note = Seed: VVVGAGDVG (KRAS G13D)
YVVMAYDVM

SEQ ID NO: 98099 - protein, 9 aa, synthetic construct
  source 1..9: note = Seed: VVVGAGDVG (KRAS G13D)
YVVMAYDVN

SEQ ID NO: 98100 - protein, 9 aa, synthetic construct
  source 1..9: note = Seed: VVVGAGDVG (KRAS G13D)
YVVMAYDVP

SEQ ID NO: 98101 - protein, 9 aa, synthetic construct
  source 1..9: note = Seed: VVVGAGDVG (KRAS G13D)
YVVMAYDVQ

SEQ ID NO: 98102 - protein, 9 aa, synthetic construct
  source 1..9: note = Seed: VVVGAGDVG (KRAS G13D)
YVVMAYDVS

SEQ ID NO: 98103 - protein, 9 aa, synthetic construct
  source 1..9: note = Seed: VVVGAGDVG (KRAS G13D)
YVVMAYDVT

SEQ ID NO: 98104 - protein, 9 aa, synthetic construct
  source 1..9: note = Seed: VVVGAGDVG (KRAS G13D)
YVVMAYDVV

SEQ ID NO: 98105 - protein, 9 aa, synthetic construct
  source 1..9: note = Seed: VVVGAGDVG (KRAS G13D)
YVVNAADVA

SEQ ID NO: 98106 - protein, 9 aa, synthetic construct
  source 1..9: note = Seed: VVVGAGDVG (KRAS G13D)
YVVNAADVE

SEQ ID NO: 98107 - protein, 9 aa, synthetic construct
  source 1..9: note = Seed: VVVGAGDVG (KRAS G13D)
YVVNAADVF

SEQ ID NO: 98108 - protein, 9 aa, synthetic construct
  source 1..9: note = Seed: VVVGAGDVG (KRAS G13D)
YVVNAADVG

SEQ ID NO: 98109 - protein, 9 aa, synthetic construct
  source 1..9: note = Seed: VVVGAGDVG (KRAS G13D)
YVVNAADVH

SEQ ID NO: 98110 - protein, 9 aa, synthetic construct
  source 1..9: note = Seed: VVVGAGDVG (KRAS G13D)
YVVNAADVI

SEQ ID NO: 98111 - protein, 9 aa, synthetic construct
  source 1..9: note = Seed: VVVGAGDVG (KRAS G13D)
YVVNAADVK

SEQ ID NO: 98112 - protein, 9 aa, synthetic construct
  source 1..9: note = Seed: VVVGAGDVG (KRAS G13D)
YVVNAADVL

SEQ ID NO: 98113 - protein, 9 aa, synthetic construct
  source 1..9: note = Seed: VVVGAGDVG (KRAS G13D)
YVVNAADVM

SEQ ID NO: 98114 - protein, 9 aa, synthetic construct
  source 1..9: note = Seed: VVVGAGDVG (KRAS G13D)
YVVNAADVN

SEQ ID NO: 98115 - protein, 9 aa, synthetic construct
  source 1..9: note = Seed: VVVGAGDVG (KRAS G13D)
YVVNAADVP

SEQ ID NO: 98116 - protein, 9 aa, synthetic construct
  source 1..9: note = Seed: VVVGAGDVG (KRAS G13D)
YVVNAADVQ

SEQ ID NO: 98117 - protein, 9 aa, synthetic construct
  source 1..9: note = Seed: VVVGAGDVG (KRAS G13D)
YVVNAADVR

SEQ ID NO: 98118 - protein, 9 aa, synthetic construct
  source 1..9: note = Seed: VVVGAGDVG (KRAS G13D)
YVVNAADVS

SEQ ID NO: 98119 - protein, 9 aa, synthetic construct
  source 1..9: note = Seed: VVVGAGDVG (KRAS G13D)
YVVNAADVT

SEQ ID NO: 98120 - protein, 9 aa, synthetic construct
  source 1..9: note = Seed: VVVGAGDVG (KRAS G13D)
YVVNAADVV

SEQ ID NO: 98121 - protein, 9 aa, synthetic construct
  source 1..9: note = Seed: VVVGAGDVG (KRAS G13D)
YVVNAADVW

SEQ ID NO: 98122 - protein, 9 aa, synthetic construct
  source 1..9: note = Seed: VVVGAGDVG (KRAS G13D)
YVVNAADVY

SEQ ID NO: 98123 - protein, 9 aa, synthetic construct
  source 1..9: note = Seed: VVVGAGDVG (KRAS G13D)
YVVNADDVA

SEQ ID NO: 98124 - protein, 9 aa, synthetic construct
  source 1..9: note = Seed: VVVGAGDVG (KRAS G13D)
YVVNAIDVA

SEQ ID NO: 98125 - protein, 9 aa, synthetic construct
  source 1..9: note = Seed: VVVGAGDVG (KRAS G13D)
YVVNAIDVG

SEQ ID NO: 98126 - protein, 9 aa, synthetic construct
  source 1..9: note = Seed: VVVGAGDVG (KRAS G13D)
YVVNAIDVH

SEQ ID NO: 98127 - protein, 9 aa, synthetic construct
  source 1..9: note = Seed: VVVGAGDVG (KRAS G13D)
YVVNAIDVI

SEQ ID NO: 98128 - protein, 9 aa, synthetic construct
  source 1..9: note = Seed: VVVGAGDVG (KRAS G13D)
YVVNAIDVL

SEQ ID NO: 98129 - protein, 9 aa, synthetic construct
  source 1..9: note = Seed: VVVGAGDVG (KRAS G13D)
YVVNAIDVM

SEQ ID NO: 98130 - protein, 9 aa, synthetic construct
  source 1..9: note = Seed: VVVGAGDVG (KRAS G13D)
YVVNAIDVN

SEQ ID NO: 98131 - protein, 9 aa, synthetic construct
  source 1..9: note = Seed: VVVGAGDVG (KRAS G13D)
YVVNAIDVQ

SEQ ID NO: 98132 - protein, 9 aa, synthetic construct
  source 1..9: note = Seed: VVVGAGDVG (KRAS G13D)
YVVNAIDVS

SEQ ID NO: 98133 - protein, 9 aa, synthetic construct
  source 1..9: note = Seed: VVVGAGDVG (KRAS G13D)
YVVNAIDVT

SEQ ID NO: 98134 - protein, 9 aa, synthetic construct
  source 1..9: note = Seed: VVVGAGDVG (KRAS G13D)
YVVNAIDVV

SEQ ID NO: 98135 - protein, 9 aa, synthetic construct
  source 1..9: note = Seed: VVVGAGDVG (KRAS G13D)
YVVNALDVA

SEQ ID NO: 98136 - protein, 9 aa, synthetic construct
  source 1..9: note = Seed: VVVGAGDVG (KRAS G13D)
YVVNALDVG

SEQ ID NO: 98137 - protein, 9 aa, synthetic construct
  source 1..9: note = Seed: VVVGAGDVG (KRAS G13D)
YVVNALDVI

SEQ ID NO: 98138 - protein, 9 aa, synthetic construct
  source 1..9: note = Seed: VVVGAGDVG (KRAS G13D)
YVVNALDVM

SEQ ID NO: 98139 - protein, 9 aa, synthetic construct
  source 1..9: note = Seed: VVVGAGDVG (KRAS G13D)
YVVNALDVS

SEQ ID NO: 98140 - protein, 9 aa, synthetic construct
  source 1..9: note = Seed: VVVGAGDVG (KRAS G13D)
YVVNALDVV

SEQ ID NO: 98141 - protein, 9 aa, synthetic construct
  source 1..9: note = Seed: VVVGAGDVG (KRAS G13D)
YVVNANDVA

SEQ ID NO: 98142 - protein, 9 aa, synthetic construct
  source 1..9: note = Seed: VVVGAGDVG (KRAS G13D)
YVVNANDVE

SEQ ID NO: 98143 - protein, 9 aa, synthetic construct
  source 1..9: note = Seed: VVVGAGDVG (KRAS G13D)
YVVNANDVG

SEQ ID NO: 98144 - protein, 9 aa, synthetic construct
  source 1..9: note = Seed: VVVGAGDVG (KRAS G13D)
YVVNANDVH

SEQ ID NO: 98145 - protein, 9 aa, synthetic construct
  source 1..9: note = Seed: VVVGAGDVG (KRAS G13D)
YVVNANDVI

SEQ ID NO: 98146 - protein, 9 aa, synthetic construct
  source 1..9: note = Seed: VVVGAGDVG (KRAS G13D)
YVVNANDVL

SEQ ID NO: 98147 - protein, 9 aa, synthetic construct
  source 1..9: note = Seed: VVVGAGDVG (KRAS G13D)
YVVNANDVM

SEQ ID NO: 98148 - protein, 9 aa, synthetic construct
  source 1..9: note = Seed: VVVGAGDVG (KRAS G13D)
YVVNANDVN

SEQ ID NO: 98149 - protein, 9 aa, synthetic construct
  source 1..9: note = Seed: VVVGAGDVG (KRAS G13D)
YVVNANDVQ

SEQ ID NO: 98150 - protein, 9 aa, synthetic construct
  source 1..9: note = Seed: VVVGAGDVG (KRAS G13D)
YVVNANDVS

SEQ ID NO: 98151 - protein, 9 aa, synthetic construct
  source 1..9: note = Seed: VVVGAGDVG (KRAS G13D)
YVVNANDVT

SEQ ID NO: 98152 - protein, 9 aa, synthetic construct
  source 1..9: note = Seed: VVVGAGDVG (KRAS G13D)
YVVNANDVV

SEQ ID NO: 98153 - protein, 9 aa, synthetic construct
  source 1..9: note = Seed: VVVGAGDVG (KRAS G13D)
YVVNANDVY

SEQ ID NO: 98154 - protein, 9 aa, synthetic construct
  source 1..9: note = Seed: VVVGAGDVG (KRAS G13D)
YVVNAPDVA

SEQ ID NO: 98155 - protein, 9 aa, synthetic construct
  source 1..9: note = Seed: VVVGAGDVG (KRAS G13D)
YVVNAPDVF

SEQ ID NO: 98156 - protein, 9 aa, synthetic construct
  source 1..9: note = Seed: VVVGAGDVG (KRAS G13D)
YVVNAPDVI

SEQ ID NO: 98157 - protein, 9 aa, synthetic construct
  source 1..9: note = Seed: VVVGAGDVG (KRAS G13D)
YVVNAPDVL

SEQ ID NO: 98158 - protein, 9 aa, synthetic construct
  source 1..9: note = Seed: VVVGAGDVG (KRAS G13D)
YVVNAPDVM

SEQ ID NO: 98159 - protein, 9 aa, synthetic construct
  source 1..9: note = Seed: VVVGAGDVG (KRAS G13D)
YVVNAPDVS

SEQ ID NO: 98160 - protein, 9 aa, synthetic construct
  source 1..9: note = Seed: VVVGAGDVG (KRAS G13D)
YVVNAPDVV

SEQ ID NO: 98161 - protein, 9 aa, synthetic construct
  source 1..9: note = Seed: VVVGAGDVG (KRAS G13D)
YVVNAPDVY

SEQ ID NO: 98162 - protein, 9 aa, synthetic construct
  source 1..9: note = Seed: VVVGAGDVG (KRAS G13D)
YVVNAQDVA

SEQ ID NO: 98163 - protein, 9 aa, synthetic construct
  source 1..9: note = Seed: VVVGAGDVG (KRAS G13D)
YVVNASDVA

SEQ ID NO: 98164 - protein, 9 aa, synthetic construct
  source 1..9: note = Seed: VVVGAGDVG (KRAS G13D)
YVVNASDVF

SEQ ID NO: 98165 - protein, 9 aa, synthetic construct
  source 1..9: note = Seed: VVVGAGDVG (KRAS G13D)
YVVNASDVH

SEQ ID NO: 98166 - protein, 9 aa, synthetic construct
  source 1..9: note = Seed: VVVGAGDVG (KRAS G13D)
YVVNASDVI

SEQ ID NO: 98167 - protein, 9 aa, synthetic construct
  source 1..9: note = Seed: VVVGAGDVG (KRAS G13D)
YVVNASDVL

SEQ ID NO: 98168 - protein, 9 aa, synthetic construct
  source 1..9: note = Seed: VVVGAGDVG (KRAS G13D)
YVVNASDVM

SEQ ID NO: 98169 - protein, 9 aa, synthetic construct
  source 1..9: note = Seed: VVVGAGDVG (KRAS G13D)
YVVNASDVN

SEQ ID NO: 98170 - protein, 9 aa, synthetic construct
  source 1..9: note = Seed: VVVGAGDVG (KRAS G13D)
YVVNASDVQ

SEQ ID NO: 98171 - protein, 9 aa, synthetic construct
  source 1..9: note = Seed: VVVGAGDVG (KRAS G13D)
YVVNASDVR

SEQ ID NO: 98172 - protein, 9 aa, synthetic construct
  source 1..9: note = Seed: VVVGAGDVG (KRAS G13D)
YVVNASDVS

SEQ ID NO: 98173 - protein, 9 aa, synthetic construct
  source 1..9: note = Seed: VVVGAGDVG (KRAS G13D)
YVVNASDVT

SEQ ID NO: 98174 - protein, 9 aa, synthetic construct
  source 1..9: note = Seed: VVVGAGDVG (KRAS G13D)
YVVNASDVV

SEQ ID NO: 98175 - protein, 9 aa, synthetic construct
  source 1..9: note = Seed: VVVGAGDVG (KRAS G13D)
YVVNASDVY

SEQ ID NO: 98176 - protein, 9 aa, synthetic construct
  source 1..9: note = Seed: VVVGAGDVG (KRAS G13D)
YVVNATDVA

SEQ ID NO: 98177 - protein, 9 aa, synthetic construct
  source 1..9: note = Seed: VVVGAGDVG (KRAS G13D)
YVVNATDVF

SEQ ID NO: 98178 - protein, 9 aa, synthetic construct
  source 1..9: note = Seed: VVVGAGDVG (KRAS G13D)
YVVNATDVI

SEQ ID NO: 98179 - protein, 9 aa, synthetic construct
  source 1..9: note = Seed: VVVGAGDVG (KRAS G13D)
YVVNATDVL

SEQ ID NO: 98180 - protein, 9 aa, synthetic construct
  source 1..9: note = Seed: VVVGAGDVG (KRAS G13D)
YVVNATDVM

SEQ ID NO: 98181 - protein, 9 aa, synthetic construct
  source 1..9: note = Seed: VVVGAGDVG (KRAS G13D)
YVVNATDVN

SEQ ID NO: 98182 - protein, 9 aa, synthetic construct
  source 1..9: note = Seed: VVVGAGDVG (KRAS G13D)
YVVNATDVS

SEQ ID NO: 98183 - protein, 9 aa, synthetic construct
  source 1..9: note = Seed: VVVGAGDVG (KRAS G13D)
YVVNATDVV

SEQ ID NO: 98184 - protein, 9 aa, synthetic construct
  source 1..9: note = Seed: VVVGAGDVG (KRAS G13D)
YVVNATDVY

SEQ ID NO: 98185 - protein, 9 aa, synthetic construct
  source 1..9: note = Seed: VVVGAGDVG (KRAS G13D)
YVVNAVDVA

SEQ ID NO: 98186 - protein, 9 aa, synthetic construct
  source 1..9: note = Seed: VVVGAGDVG (KRAS G13D)
YVVNAVDVF

SEQ ID NO: 98187 - protein, 9 aa, synthetic construct
  source 1..9: note = Seed: VVVGAGDVG (KRAS G13D)
YVVNAVDVH

SEQ ID NO: 98188 - protein, 9 aa, synthetic construct
  source 1..9: note = Seed: VVVGAGDVG (KRAS G13D)
YVVNAVDVI

SEQ ID NO: 98189 - protein, 9 aa, synthetic construct
  source 1..9: note = Seed: VVVGAGDVG (KRAS G13D)
YVVNAVDVL

SEQ ID NO: 98190 - protein, 9 aa, synthetic construct
  source 1..9: note = Seed: VVVGAGDVG (KRAS G13D)
YVVNAVDVM

SEQ ID NO: 98191 - protein, 9 aa, synthetic construct
  source 1..9: note = Seed: VVVGAGDVG (KRAS G13D)
YVVNAVDVN

SEQ ID NO: 98192 - protein, 9 aa, synthetic construct
  source 1..9: note = Seed: VVVGAGDVG (KRAS G13D)
YVVNAVDVQ

SEQ ID NO: 98193 - protein, 9 aa, synthetic construct
  source 1..9: note = Seed: VVVGAGDVG (KRAS G13D)
YVVNAVDVR

SEQ ID NO: 98194 - protein, 9 aa, synthetic construct
  source 1..9: note = Seed: VVVGAGDVG (KRAS G13D)
YVVNAVDVS

SEQ ID NO: 98195 - protein, 9 aa, synthetic construct
  source 1..9: note = Seed: VVVGAGDVG (KRAS G13D)
YVVNAVDVT

SEQ ID NO: 98196 - protein, 9 aa, synthetic construct
  source 1..9: note = Seed: VVVGAGDVG (KRAS G13D)
YVVNAVDVV

SEQ ID NO: 98197 - protein, 9 aa, synthetic construct
  source 1..9: note = Seed: VVVGAGDVG (KRAS G13D)
YVVPAADVA

SEQ ID NO: 98198 - protein, 9 aa, synthetic construct
  source 1..9: note = Seed: VVVGAGDVG (KRAS G13D)
YVVPAADVC

SEQ ID NO: 98199 - protein, 9 aa, synthetic construct
  source 1..9: note = Seed: VVVGAGDVG (KRAS G13D)
YVVPAADVG

SEQ ID NO: 98200 - protein, 9 aa, synthetic construct
  source 1..9: note = Seed: VVVGAGDVG (KRAS G13D)
YVVPAADVI

SEQ ID NO: 98201 - protein, 9 aa, synthetic construct
  source 1..9: note = Seed: VVVGAGDVG (KRAS G13D)
YVVPAADVL

SEQ ID NO: 98202 - protein, 9 aa, synthetic construct
  source 1..9: note = Seed: VVVGAGDVG (KRAS G13D)
YVVPAADVM

SEQ ID NO: 98203 - protein, 9 aa, synthetic construct
  source 1..9: note = Seed: VVVGAGDVG (KRAS G13D)
YVVPAADVS

SEQ ID NO: 98204 - protein, 9 aa, synthetic construct
  source 1..9: note = Seed: VVVGAGDVG (KRAS G13D)
YVVPAADVV

SEQ ID NO: 98205 - protein, 9 aa, synthetic construct
  source 1..9: note = Seed: VVVGAGDVG (KRAS G13D)
YVVPACDVA

SEQ ID NO: 98206 - protein, 9 aa, synthetic construct
  source 1..9: note = Seed: VVVGAGDVG (KRAS G13D)
YVVPACDVI

SEQ ID NO: 98207 - protein, 9 aa, synthetic construct
  source 1..9: note = Seed: VVVGAGDVG (KRAS G13D)
YVVPACDVV

SEQ ID NO: 98208 - protein, 9 aa, synthetic construct
  source 1..9: note = Seed: VVVGAGDVG (KRAS G13D)
YVVPAPDVA

SEQ ID NO: 98209 - protein, 9 aa, synthetic construct
  source 1..9: note = Seed: VVVGAGDVG (KRAS G13D)
YVVPAPDVI

SEQ ID NO: 98210 - protein, 9 aa, synthetic construct
  source 1..9: note = Seed: VVVGAGDVG (KRAS G13D)
YVVPAPDVL

SEQ ID NO: 98211 - protein, 9 aa, synthetic construct
  source 1..9: note = Seed: VVVGAGDVG (KRAS G13D)
YVVPAPDVV

SEQ ID NO: 98212 - protein, 9 aa, synthetic construct
  source 1..9: note = Seed: VVVGAGDVG (KRAS G13D)
YVVPASDVA

SEQ ID NO: 98213 - protein, 9 aa, synthetic construct
  source 1..9: note = Seed: VVVGAGDVG (KRAS G13D)
YVVPASDVC

SEQ ID NO: 98214 - protein, 9 aa, synthetic construct
  source 1..9: note = Seed: VVVGAGDVG (KRAS G13D)
YVVPASDVG

SEQ ID NO: 98215 - protein, 9 aa, synthetic construct
  source 1..9: note = Seed: VVVGAGDVG (KRAS G13D)
YVVPASDVI

SEQ ID NO: 98216 - protein, 9 aa, synthetic construct
  source 1..9: note = Seed: VVVGAGDVG (KRAS G13D)
YVVPASDVL

SEQ ID NO: 98217 - protein, 9 aa, synthetic construct
  source 1..9: note = Seed: VVVGAGDVG (KRAS G13D)
YVVPASDVS

SEQ ID NO: 98218 - protein, 9 aa, synthetic construct
  source 1..9: note = Seed: VVVGAGDVG (KRAS G13D)
YVVPASDVV

SEQ ID NO: 98219 - protein, 9 aa, synthetic construct
  source 1..9: note = Seed: VVVGAGDVG (KRAS G13D)
YVVPATDVA

SEQ ID NO: 98220 - protein, 9 aa, synthetic construct
  source 1..9: note = Seed: VVVGAGDVG (KRAS G13D)
YVVPATDVI

SEQ ID NO: 98221 - protein, 9 aa, synthetic construct
  source 1..9: note = Seed: VVVGAGDVG (KRAS G13D)
YVVPATDVL

SEQ ID NO: 98222 - protein, 9 aa, synthetic construct
  source 1..9: note = Seed: VVVGAGDVG (KRAS G13D)
YVVPATDVM

SEQ ID NO: 98223 - protein, 9 aa, synthetic construct
  source 1..9: note = Seed: VVVGAGDVG (KRAS G13D)
YVVPATDVS

SEQ ID NO: 98224 - protein, 9 aa, synthetic construct
  source 1..9: note = Seed: VVVGAGDVG (KRAS G13D)
YVVPATDVV

SEQ ID NO: 98225 - protein, 9 aa, synthetic construct
  source 1..9: note = Seed: VVVGAGDVG (KRAS G13D)
YVVPATDVY

SEQ ID NO: 98226 - protein, 9 aa, synthetic construct
  source 1..9: note = Seed: VVVGAGDVG (KRAS G13D)
YVVPAVDVA

SEQ ID NO: 98227 - protein, 9 aa, synthetic construct
  source 1..9: note = Seed: VVVGAGDVG (KRAS G13D)
YVVPAVDVC

SEQ ID NO: 98228 - protein, 9 aa, synthetic construct
  source 1..9: note = Seed: VVVGAGDVG (KRAS G13D)
YVVPAVDVV

SEQ ID NO: 98229 - protein, 9 aa, synthetic construct
  source 1..9: note = Seed: VVVGAGDVG (KRAS G13D)
YVVPAVDVY

SEQ ID NO: 98230 - protein, 9 aa, synthetic construct
  source 1..9: note = Seed: VVVGAGDVG (KRAS G13D)
YVVQAADVA

SEQ ID NO: 98231 - protein, 9 aa, synthetic construct
  source 1..9: note = Seed: VVVGAGDVG (KRAS G13D)
YVVQAADVC

SEQ ID NO: 98232 - protein, 9 aa, synthetic construct
  source 1..9: note = Seed: VVVGAGDVG (KRAS G13D)
YVVQAADVD

SEQ ID NO: 98233 - protein, 9 aa, synthetic construct
  source 1..9: note = Seed: VVVGAGDVG (KRAS G13D)
YVVQAADVE

SEQ ID NO: 98234 - protein, 9 aa, synthetic construct
  source 1..9: note = Seed: VVVGAGDVG (KRAS G13D)
YVVQAADVF

SEQ ID NO: 98235 - protein, 9 aa, synthetic construct
  source 1..9: note = Seed: VVVGAGDVG (KRAS G13D)
YVVQAADVG

SEQ ID NO: 98236 - protein, 9 aa, synthetic construct
  source 1..9: note = Seed: VVVGAGDVG (KRAS G13D)
YVVQAADVH

SEQ ID NO: 98237 - protein, 9 aa, synthetic construct
  source 1..9: note = Seed: VVVGAGDVG (KRAS G13D)
YVVQAADVI

SEQ ID NO: 98238 - protein, 9 aa, synthetic construct
  source 1..9: note = Seed: VVVGAGDVG (KRAS G13D)
YVVQAADVK

SEQ ID NO: 98239 - protein, 9 aa, synthetic construct
  source 1..9: note = Seed: VVVGAGDVG (KRAS G13D)
YVVQAADVL

SEQ ID NO: 98240 - protein, 9 aa, synthetic construct
  source 1..9: note = Seed: VVVGAGDVG (KRAS G13D)
YVVQAADVM

SEQ ID NO: 98241 - protein, 9 aa, synthetic construct
  source 1..9: note = Seed: VVVGAGDVG (KRAS G13D)
YVVQAADVN

SEQ ID NO: 98242 - protein, 9 aa, synthetic construct
  source 1..9: note = Seed: VVVGAGDVG (KRAS G13D)
YVVQAADVP

SEQ ID NO: 98243 - protein, 9 aa, synthetic construct
  source 1..9: note = Seed: VVVGAGDVG (KRAS G13D)
YVVQAADVQ

SEQ ID NO: 98244 - protein, 9 aa, synthetic construct
  source 1..9: note = Seed: VVVGAGDVG (KRAS G13D)
YVVQAADVR

SEQ ID NO: 98245 - protein, 9 aa, synthetic construct
  source 1..9: note = Seed: VVVGAGDVG (KRAS G13D)
YVVQAADVS

SEQ ID NO: 98246 - protein, 9 aa, synthetic construct
  source 1..9: note = Seed: VVVGAGDVG (KRAS G13D)
YVVQAADVT

SEQ ID NO: 98247 - protein, 9 aa, synthetic construct
  source 1..9: note = Seed: VVVGAGDVG (KRAS G13D)
YVVQAADVV

SEQ ID NO: 98248 - protein, 9 aa, synthetic construct
  source 1..9: note = Seed: VVVGAGDVG (KRAS G13D)
YVVQAADVW

SEQ ID NO: 98249 - protein, 9 aa, synthetic construct
  source 1..9: note = Seed: VVVGAGDVG (KRAS G13D)
YVVQAADVY

SEQ ID NO: 98250 - protein, 9 aa, synthetic construct
  source 1..9: note = Seed: VVVGAGDVG (KRAS G13D)
YVVQACDVA

SEQ ID NO: 98251 - protein, 9 aa, synthetic construct
  source 1..9: note = Seed: VVVGAGDVG (KRAS G13D)
YVVQADDVA

SEQ ID NO: 98252 - protein, 9 aa, synthetic construct
  source 1..9: note = Seed: VVVGAGDVG (KRAS G13D)
YVVQAEDVA

SEQ ID NO: 98253 - protein, 9 aa, synthetic construct
  source 1..9: note = Seed: VVVGAGDVG (KRAS G13D)
YVVQAEDVI

SEQ ID NO: 98254 - protein, 9 aa, synthetic construct
  source 1..9: note = Seed: VVVGAGDVG (KRAS G13D)
YVVQAEDVL

SEQ ID NO: 98255 - protein, 9 aa, synthetic construct
  source 1..9: note = Seed: VVVGAGDVG (KRAS G13D)
YVVQAEDVM

SEQ ID NO: 98256 - protein, 9 aa, synthetic construct
  source 1..9: note = Seed: VVVGAGDVG (KRAS G13D)
YVVQAEDVN

SEQ ID NO: 98257 - protein, 9 aa, synthetic construct
  source 1..9: note = Seed: VVVGAGDVG (KRAS G13D)
YVVQAEDVS

SEQ ID NO: 98258 - protein, 9 aa, synthetic construct
  source 1..9: note = Seed: VVVGAGDVG (KRAS G13D)
YVVQAEDVT

SEQ ID NO: 98259 - protein, 9 aa, synthetic construct
  source 1..9: note = Seed: VVVGAGDVG (KRAS G13D)
YVVQAEDVV

SEQ ID NO: 98260 - protein, 9 aa, synthetic construct
  source 1..9: note = Seed: VVVGAGDVG (KRAS G13D)
YVVQAFDVA

SEQ ID NO: 98261 - protein, 9 aa, synthetic construct
  source 1..9: note = Seed: VVVGAGDVG (KRAS G13D)
YVVQAFDVM

SEQ ID NO: 98262 - protein, 9 aa, synthetic construct
  source 1..9: note = Seed: VVVGAGDVG (KRAS G13D)
YVVQAFDVN

SEQ ID NO: 98263 - protein, 9 aa, synthetic construct
  source 1..9: note = Seed: VVVGAGDVG (KRAS G13D)
YVVQAFDVS

SEQ ID NO: 98264 - protein, 9 aa, synthetic construct
  source 1..9: note = Seed: VVVGAGDVG (KRAS G13D)
YVVQAFDVT

SEQ ID NO: 98265 - protein, 9 aa, synthetic construct
  source 1..9: note = Seed: VVVGAGDVG (KRAS G13D)
YVVQAGDVA

SEQ ID NO: 98266 - protein, 9 aa, synthetic construct
  source 1..9: note = Seed: VVVGAGDVG (KRAS G13D)
YVVQAGDVF

SEQ ID NO: 98267 - protein, 9 aa, synthetic construct
  source 1..9: note = Seed: VVVGAGDVG (KRAS G13D)
YVVQAGDVG

SEQ ID NO: 98268 - protein, 9 aa, synthetic construct
  source 1..9: note = Seed: VVVGAGDVG (KRAS G13D)
YVVQAGDVH

SEQ ID NO: 98269 - protein, 9 aa, synthetic construct
  source 1..9: note = Seed: VVVGAGDVG (KRAS G13D)
YVVQAGDVI

SEQ ID NO: 98270 - protein, 9 aa, synthetic construct
  source 1..9: note = Seed: VVVGAGDVG (KRAS G13D)
YVVQAGDVL

SEQ ID NO: 98271 - protein, 9 aa, synthetic construct
  source 1..9: note = Seed: VVVGAGDVG (KRAS G13D)
YVVQAGDVM

SEQ ID NO: 98272 - protein, 9 aa, synthetic construct
  source 1..9: note = Seed: VVVGAGDVG (KRAS G13D)
YVVQAGDVN

SEQ ID NO: 98273 - protein, 9 aa, synthetic construct
  source 1..9: note = Seed: VVVGAGDVG (KRAS G13D)
YVVQAGDVQ

SEQ ID NO: 98274 - protein, 9 aa, synthetic construct
  source 1..9: note = Seed: VVVGAGDVG (KRAS G13D)
YVVQAGDVS

SEQ ID NO: 98275 - protein, 9 aa, synthetic construct
  source 1..9: note = Seed: VVVGAGDVG (KRAS G13D)
YVVQAGDVT

SEQ ID NO: 98276 - protein, 9 aa, synthetic construct
  source 1..9: note = Seed: VVVGAGDVG (KRAS G13D)
YVVQAGDVV

SEQ ID NO: 98277 - protein, 9 aa, synthetic construct
  source 1..9: note = Seed: VVVGAGDVG (KRAS G13D)
YVVQAGDVY

SEQ ID NO: 98278 - protein, 9 aa, synthetic construct
  source 1..9: note = Seed: VVVGAGDVG (KRAS G13D)
YVVQAHDVA

SEQ ID NO: 98279 - protein, 9 aa, synthetic construct
  source 1..9: note = Seed: VVVGAGDVG (KRAS G13D)
YVVQAHDVI

SEQ ID NO: 98280 - protein, 9 aa, synthetic construct
  source 1..9: note = Seed: VVVGAGDVG (KRAS G13D)
YVVQAHDVL

SEQ ID NO: 98281 - protein, 9 aa, synthetic construct
  source 1..9: note = Seed: VVVGAGDVG (KRAS G13D)
YVVQAHDVM

SEQ ID NO: 98282 - protein, 9 aa, synthetic construct
  source 1..9: note = Seed: VVVGAGDVG (KRAS G13D)
YVVQAHDVN

SEQ ID NO: 98283 - protein, 9 aa, synthetic construct
  source 1..9: note = Seed: VVVGAGDVG (KRAS G13D)
YVVQAHDVQ

SEQ ID NO: 98284 - protein, 9 aa, synthetic construct
  source 1..9: note = Seed: VVVGAGDVG (KRAS G13D)
YVVQAHDVS

SEQ ID NO: 98285 - protein, 9 aa, synthetic construct
  source 1..9: note = Seed: VVVGAGDVG (KRAS G13D)
YVVQAHDVT

SEQ ID NO: 98286 - protein, 9 aa, synthetic construct
  source 1..9: note = Seed: VVVGAGDVG (KRAS G13D)
YVVQAHDVV

SEQ ID NO: 98287 - protein, 9 aa, synthetic construct
  source 1..9: note = Seed: VVVGAGDVG (KRAS G13D)
YVVQAIDVA

SEQ ID NO: 98288 - protein, 9 aa, synthetic construct
  source 1..9: note = Seed: VVVGAGDVG (KRAS G13D)
YVVQAIDVC

SEQ ID NO: 98289 - protein, 9 aa, synthetic construct
  source 1..9: note = Seed: VVVGAGDVG (KRAS G13D)
YVVQAIDVD

SEQ ID NO: 98290 - protein, 9 aa, synthetic construct
  source 1..9: note = Seed: VVVGAGDVG (KRAS G13D)
YVVQAIDVE

SEQ ID NO: 98291 - protein, 9 aa, synthetic construct
  source 1..9: note = Seed: VVVGAGDVG (KRAS G13D)
YVVQAIDVF

SEQ ID NO: 98292 - protein, 9 aa, synthetic construct
  source 1..9: note = Seed: VVVGAGDVG (KRAS G13D)
YVVQAIDVG

SEQ ID NO: 98293 - protein, 9 aa, synthetic construct
  source 1..9: note = Seed: VVVGAGDVG (KRAS G13D)
YVVQAIDVH

SEQ ID NO: 98294 - protein, 9 aa, synthetic construct
  source 1..9: note = Seed: VVVGAGDVG (KRAS G13D)
YVVQAIDVI

SEQ ID NO: 98295 - protein, 9 aa, synthetic construct
  source 1..9: note = Seed: VVVGAGDVG (KRAS G13D)
YVVQAIDVK

SEQ ID NO: 98296 - protein, 9 aa, synthetic construct
  source 1..9: note = Seed: VVVGAGDVG (KRAS G13D)
YVVQAIDVL

SEQ ID NO: 98297 - protein, 9 aa, synthetic construct
  source 1..9: note = Seed: VVVGAGDVG (KRAS G13D)
YVVQAIDVM

SEQ ID NO: 98298 - protein, 9 aa, synthetic construct
  source 1..9: note = Seed: VVVGAGDVG (KRAS G13D)
YVVQAIDVN

SEQ ID NO: 98299 - protein, 9 aa, synthetic construct
  source 1..9: note = Seed: VVVGAGDVG (KRAS G13D)
YVVQAIDVP

SEQ ID NO: 98300 - protein, 9 aa, synthetic construct
  source 1..9: note = Seed: VVVGAGDVG (KRAS G13D)
YVVQAIDVQ

SEQ ID NO: 98301 - protein, 9 aa, synthetic construct
  source 1..9: note = Seed: VVVGAGDVG (KRAS G13D)
YVVQAIDVR

SEQ ID NO: 98302 - protein, 9 aa, synthetic construct
  source 1..9: note = Seed: VVVGAGDVG (KRAS G13D)
YVVQAIDVS

SEQ ID NO: 98303 - protein, 9 aa, synthetic construct
  source 1..9: note = Seed: VVVGAGDVG (KRAS G13D)
YVVQAIDVT

SEQ ID NO: 98304 - protein, 9 aa, synthetic construct
  source 1..9: note = Seed: VVVGAGDVG (KRAS G13D)
YVVQAIDVV

SEQ ID NO: 98305 - protein, 9 aa, synthetic construct
  source 1..9: note = Seed: VVVGAGDVG (KRAS G13D)
YVVQAIDVY

SEQ ID NO: 98306 - protein, 9 aa, synthetic construct
  source 1..9: note = Seed: VVVGAGDVG (KRAS G13D)
YVVQALDVA

SEQ ID NO: 98307 - protein, 9 aa, synthetic construct
  source 1..9: note = Seed: VVVGAGDVG (KRAS G13D)
YVVQALDVC

SEQ ID NO: 98308 - protein, 9 aa, synthetic construct
  source 1..9: note = Seed: VVVGAGDVG (KRAS G13D)
YVVQALDVD

SEQ ID NO: 98309 - protein, 9 aa, synthetic construct
  source 1..9: note = Seed: VVVGAGDVG (KRAS G13D)
YVVQALDVG

SEQ ID NO: 98310 - protein, 9 aa, synthetic construct
  source 1..9: note = Seed: VVVGAGDVG (KRAS G13D)
YVVQALDVL

SEQ ID NO: 98311 - protein, 9 aa, synthetic construct
  source 1..9: note = Seed: VVVGAGDVG (KRAS G13D)
YVVQALDVM

SEQ ID NO: 98312 - protein, 9 aa, synthetic construct
  source 1..9: note = Seed: VVVGAGDVG (KRAS G13D)
YVVQALDVS

SEQ ID NO: 98313 - protein, 9 aa, synthetic construct
  source 1..9: note = Seed: VVVGAGDVG (KRAS G13D)
YVVQALDVT

SEQ ID NO: 98314 - protein, 9 aa, synthetic construct
  source 1..9: note = Seed: VVVGAGDVG (KRAS G13D)
YVVQALDVV

SEQ ID NO: 98315 - protein, 9 aa, synthetic construct
  source 1..9: note = Seed: VVVGAGDVG (KRAS G13D)
YVVQAMDVC

SEQ ID NO: 98316 - protein, 9 aa, synthetic construct
  source 1..9: note = Seed: VVVGAGDVG (KRAS G13D)
YVVQAMDVG

SEQ ID NO: 98317 - protein, 9 aa, synthetic construct
  source 1..9: note = Seed: VVVGAGDVG (KRAS G13D)
YVVQAMDVS

SEQ ID NO: 98318 - protein, 9 aa, synthetic construct
  source 1..9: note = Seed: VVVGAGDVG (KRAS G13D)
YVVQANDVA

SEQ ID NO: 98319 - protein, 9 aa, synthetic construct
  source 1..9: note = Seed: VVVGAGDVG (KRAS G13D)
YVVQANDVC

SEQ ID NO: 98320 - protein, 9 aa, synthetic construct
  source 1..9: note = Seed: VVVGAGDVG (KRAS G13D)
YVVQANDVD

SEQ ID NO: 98321 - protein, 9 aa, synthetic construct
  source 1..9: note = Seed: VVVGAGDVG (KRAS G13D)
YVVQANDVE

SEQ ID NO: 98322 - protein, 9 aa, synthetic construct
  source 1..9: note = Seed: VVVGAGDVG (KRAS G13D)
YVVQANDVF

SEQ ID NO: 98323 - protein, 9 aa, synthetic construct
  source 1..9: note = Seed: VVVGAGDVG (KRAS G13D)
YVVQANDVG

SEQ ID NO: 98324 - protein, 9 aa, synthetic construct
  source 1..9: note = Seed: VVVGAGDVG (KRAS G13D)
YVVQANDVH

SEQ ID NO: 98325 - protein, 9 aa, synthetic construct
  source 1..9: note = Seed: VVVGAGDVG (KRAS G13D)
YVVQANDVI

SEQ ID NO: 98326 - protein, 9 aa, synthetic construct
  source 1..9: note = Seed: VVVGAGDVG (KRAS G13D)
YVVQANDVL

SEQ ID NO: 98327 - protein, 9 aa, synthetic construct
  source 1..9: note = Seed: VVVGAGDVG (KRAS G13D)
YVVQANDVM

SEQ ID NO: 98328 - protein, 9 aa, synthetic construct
  source 1..9: note = Seed: VVVGAGDVG (KRAS G13D)
YVVQANDVN

SEQ ID NO: 98329 - protein, 9 aa, synthetic construct
  source 1..9: note = Seed: VVVGAGDVG (KRAS G13D)
YVVQANDVP

SEQ ID NO: 98330 - protein, 9 aa, synthetic construct
  source 1..9: note = Seed: VVVGAGDVG (KRAS G13D)
YVVQANDVQ

SEQ ID NO: 98331 - protein, 9 aa, synthetic construct
  source 1..9: note = Seed: VVVGAGDVG (KRAS G13D)
YVVQANDVS

SEQ ID NO: 98332 - protein, 9 aa, synthetic construct
  source 1..9: note = Seed: VVVGAGDVG (KRAS G13D)
YVVQANDVT

SEQ ID NO: 98333 - protein, 9 aa, synthetic construct
  source 1..9: note = Seed: VVVGAGDVG (KRAS G13D)
YVVQANDVV

SEQ ID NO: 98334 - protein, 9 aa, synthetic construct
  source 1..9: note = Seed: VVVGAGDVG (KRAS G13D)
YVVQANDVW

SEQ ID NO: 98335 - protein, 9 aa, synthetic construct
  source 1..9: note = Seed: VVVGAGDVG (KRAS G13D)
YVVQANDVY

SEQ ID NO: 98336 - protein, 9 aa, synthetic construct
  source 1..9: note = Seed: VVVGAGDVG (KRAS G13D)
YVVQAPDVA

SEQ ID NO: 98337 - protein, 9 aa, synthetic construct
  source 1..9: note = Seed: VVVGAGDVG (KRAS G13D)
YVVQAPDVC

SEQ ID NO: 98338 - protein, 9 aa, synthetic construct
  source 1..9: note = Seed: VVVGAGDVG (KRAS G13D)
YVVQAPDVE

SEQ ID NO: 98339 - protein, 9 aa, synthetic construct
  source 1..9: note = Seed: VVVGAGDVG (KRAS G13D)
YVVQAPDVF

SEQ ID NO: 98340 - protein, 9 aa, synthetic construct
  source 1..9: note = Seed: VVVGAGDVG (KRAS G13D)
YVVQAPDVG

SEQ ID NO: 98341 - protein, 9 aa, synthetic construct
  source 1..9: note = Seed: VVVGAGDVG (KRAS G13D)
YVVQAPDVH

SEQ ID NO: 98342 - protein, 9 aa, synthetic construct
  source 1..9: note = Seed: VVVGAGDVG (KRAS G13D)
YVVQAPDVI

SEQ ID NO: 98343 - protein, 9 aa, synthetic construct
  source 1..9: note = Seed: VVVGAGDVG (KRAS G13D)
YVVQAPDVK

SEQ ID NO: 98344 - protein, 9 aa, synthetic construct
  source 1..9: note = Seed: VVVGAGDVG (KRAS G13D)
YVVQAPDVL

SEQ ID NO: 98345 - protein, 9 aa, synthetic construct
  source 1..9: note = Seed: VVVGAGDVG (KRAS G13D)
YVVQAPDVM

SEQ ID NO: 98346 - protein, 9 aa, synthetic construct
  source 1..9: note = Seed: VVVGAGDVG (KRAS G13D)
YVVQAPDVN

SEQ ID NO: 98347 - protein, 9 aa, synthetic construct
  source 1..9: note = Seed: VVVGAGDVG (KRAS G13D)
YVVQAPDVP

SEQ ID NO: 98348 - protein, 9 aa, synthetic construct
  source 1..9: note = Seed: VVVGAGDVG (KRAS G13D)
YVVQAPDVQ

SEQ ID NO: 98349 - protein, 9 aa, synthetic construct
  source 1..9: note = Seed: VVVGAGDVG (KRAS G13D)
YVVQAPDVR

SEQ ID NO: 98350 - protein, 9 aa, synthetic construct
  source 1..9: note = Seed: VVVGAGDVG (KRAS G13D)
YVVQAPDVS

SEQ ID NO: 98351 - protein, 9 aa, synthetic construct
  source 1..9: note = Seed: VVVGAGDVG (KRAS G13D)
YVVQAPDVT

SEQ ID NO: 98352 - protein, 9 aa, synthetic construct
  source 1..9: note = Seed: VVVGAGDVG (KRAS G13D)
YVVQAPDVV

SEQ ID NO: 98353 - protein, 9 aa, synthetic construct
  source 1..9: note = Seed: VVVGAGDVG (KRAS G13D)
YVVQAPDVW

SEQ ID NO: 98354 - protein, 9 aa, synthetic construct
  source 1..9: note = Seed: VVVGAGDVG (KRAS G13D)
YVVQAPDVY

SEQ ID NO: 98355 - protein, 9 aa, synthetic construct
  source 1..9: note = Seed: VVVGAGDVG (KRAS G13D)
YVVQAQDVA

SEQ ID NO: 98356 - protein, 9 aa, synthetic construct
  source 1..9: note = Seed: VVVGAGDVG (KRAS G13D)
YVVQAQDVG

SEQ ID NO: 98357 - protein, 9 aa, synthetic construct
  source 1..9: note = Seed: VVVGAGDVG (KRAS G13D)
YVVQAQDVI

SEQ ID NO: 98358 - protein, 9 aa, synthetic construct
  source 1..9: note = Seed: VVVGAGDVG (KRAS G13D)
YVVQAQDVL

SEQ ID NO: 98359 - protein, 9 aa, synthetic construct
  source 1..9: note = Seed: VVVGAGDVG (KRAS G13D)
YVVQAQDVM

SEQ ID NO: 98360 - protein, 9 aa, synthetic construct
  source 1..9: note = Seed: VVVGAGDVG (KRAS G13D)
YVVQAQDVN

SEQ ID NO: 98361 - protein, 9 aa, synthetic construct
  source 1..9: note = Seed: VVVGAGDVG (KRAS G13D)
YVVQAQDVQ

SEQ ID NO: 98362 - protein, 9 aa, synthetic construct
  source 1..9: note = Seed: VVVGAGDVG (KRAS G13D)
YVVQAQDVS

SEQ ID NO: 98363 - protein, 9 aa, synthetic construct
  source 1..9: note = Seed: VVVGAGDVG (KRAS G13D)
YVVQAQDVT

SEQ ID NO: 98364 - protein, 9 aa, synthetic construct
  source 1..9: note = Seed: VVVGAGDVG (KRAS G13D)
YVVQAQDVV

SEQ ID NO: 98365 - protein, 9 aa, synthetic construct
  source 1..9: note = Seed: VVVGAGDVG (KRAS G13D)
YVVQARDVA

SEQ ID NO: 98366 - protein, 9 aa, synthetic construct
  source 1..9: note = Seed: VVVGAGDVG (KRAS G13D)
YVVQARDVL

SEQ ID NO: 98367 - protein, 9 aa, synthetic construct
  source 1..9: note = Seed: VVVGAGDVG (KRAS G13D)
YVVQASDVA

SEQ ID NO: 98368 - protein, 9 aa, synthetic construct
  source 1..9: note = Seed: VVVGAGDVG (KRAS G13D)
YVVQASDVC

SEQ ID NO: 98369 - protein, 9 aa, synthetic construct
  source 1..9: note = Seed: VVVGAGDVG (KRAS G13D)
YVVQASDVD

SEQ ID NO: 98370 - protein, 9 aa, synthetic construct
  source 1..9: note = Seed: VVVGAGDVG (KRAS G13D)
YVVQASDVE

SEQ ID NO: 98371 - protein, 9 aa, synthetic construct
  source 1..9: note = Seed: VVVGAGDVG (KRAS G13D)
YVVQASDVF

SEQ ID NO: 98372 - protein, 9 aa, synthetic construct
  source 1..9: note = Seed: VVVGAGDVG (KRAS G13D)
YVVQASDVG

SEQ ID NO: 98373 - protein, 9 aa, synthetic construct
  source 1..9: note = Seed: VVVGAGDVG (KRAS G13D)
YVVQASDVH

SEQ ID NO: 98374 - protein, 9 aa, synthetic construct
  source 1..9: note = Seed: VVVGAGDVG (KRAS G13D)
YVVQASDVI

SEQ ID NO: 98375 - protein, 9 aa, synthetic construct
  source 1..9: note = Seed: VVVGAGDVG (KRAS G13D)
YVVQASDVK

SEQ ID NO: 98376 - protein, 9 aa, synthetic construct
  source 1..9: note = Seed: VVVGAGDVG (KRAS G13D)
YVVQASDVL

SEQ ID NO: 98377 - protein, 9 aa, synthetic construct
  source 1..9: note = Seed: VVVGAGDVG (KRAS G13D)
YVVQASDVM

SEQ ID NO: 98378 - protein, 9 aa, synthetic construct
  source 1..9: note = Seed: VVVGAGDVG (KRAS G13D)
YVVQASDVN

SEQ ID NO: 98379 - protein, 9 aa, synthetic construct
  source 1..9: note = Seed: VVVGAGDVG (KRAS G13D)
YVVQASDVP

SEQ ID NO: 98380 - protein, 9 aa, synthetic construct
  source 1..9: note = Seed: VVVGAGDVG (KRAS G13D)
YVVQASDVQ

SEQ ID NO: 98381 - protein, 9 aa, synthetic construct
  source 1..9: note = Seed: VVVGAGDVG (KRAS G13D)
YVVQASDVR

SEQ ID NO: 98382 - protein, 9 aa, synthetic construct
  source 1..9: note = Seed: VVVGAGDVG (KRAS G13D)
YVVQASDVS

SEQ ID NO: 98383 - protein, 9 aa, synthetic construct
  source 1..9: note = Seed: VVVGAGDVG (KRAS G13D)
YVVQASDVT

SEQ ID NO: 98384 - protein, 9 aa, synthetic construct
  source 1..9: note = Seed: VVVGAGDVG (KRAS G13D)
YVVQASDVV

SEQ ID NO: 98385 - protein, 9 aa, synthetic construct
  source 1..9: note = Seed: VVVGAGDVG (KRAS G13D)
YVVQASDVW

SEQ ID NO: 98386 - protein, 9 aa, synthetic construct
  source 1..9: note = Seed: VVVGAGDVG (KRAS G13D)
YVVQASDVY

SEQ ID NO: 98387 - protein, 9 aa, synthetic construct
  source 1..9: note = Seed: VVVGAGDVG (KRAS G13D)
YVVQATDVA

SEQ ID NO: 98388 - protein, 9 aa, synthetic construct
  source 1..9: note = Seed: VVVGAGDVG (KRAS G13D)
YVVQATDVC

SEQ ID NO: 98389 - protein, 9 aa, synthetic construct
  source 1..9: note = Seed: VVVGAGDVG (KRAS G13D)
YVVQATDVD

SEQ ID NO: 98390 - protein, 9 aa, synthetic construct
  source 1..9: note = Seed: VVVGAGDVG (KRAS G13D)
YVVQATDVE

SEQ ID NO: 98391 - protein, 9 aa, synthetic construct
  source 1..9: note = Seed: VVVGAGDVG (KRAS G13D)
YVVQATDVF

SEQ ID NO: 98392 - protein, 9 aa, synthetic construct
  source 1..9: note = Seed: VVVGAGDVG (KRAS G13D)
YVVQATDVG

SEQ ID NO: 98393 - protein, 9 aa, synthetic construct
  source 1..9: note = Seed: VVVGAGDVG (KRAS G13D)
YVVQATDVH

SEQ ID NO: 98394 - protein, 9 aa, synthetic construct
  source 1..9: note = Seed: VVVGAGDVG (KRAS G13D)
YVVQATDVI

SEQ ID NO: 98395 - protein, 9 aa, synthetic construct
  source 1..9: note = Seed: VVVGAGDVG (KRAS G13D)
YVVQATDVK

SEQ ID NO: 98396 - protein, 9 aa, synthetic construct
  source 1..9: note = Seed: VVVGAGDVG (KRAS G13D)
YVVQATDVL

SEQ ID NO: 98397 - protein, 9 aa, synthetic construct
  source 1..9: note = Seed: VVVGAGDVG (KRAS G13D)
YVVQATDVM

SEQ ID NO: 98398 - protein, 9 aa, synthetic construct
  source 1..9: note = Seed: VVVGAGDVG (KRAS G13D)
YVVQATDVN

SEQ ID NO: 98399 - protein, 9 aa, synthetic construct
  source 1..9: note = Seed: VVVGAGDVG (KRAS G13D)
YVVQATDVP

SEQ ID NO: 98400 - protein, 9 aa, synthetic construct
  source 1..9: note = Seed: VVVGAGDVG (KRAS G13D)
YVVQATDVQ

SEQ ID NO: 98401 - protein, 9 aa, synthetic construct
  source 1..9: note = Seed: VVVGAGDVG (KRAS G13D)
YVVQATDVR

SEQ ID NO: 98402 - protein, 9 aa, synthetic construct
  source 1..9: note = Seed: VVVGAGDVG (KRAS G13D)
YVVQATDVS

SEQ ID NO: 98403 - protein, 9 aa, synthetic construct
  source 1..9: note = Seed: VVVGAGDVG (KRAS G13D)
YVVQATDVT

SEQ ID NO: 98404 - protein, 9 aa, synthetic construct
  source 1..9: note = Seed: VVVGAGDVG (KRAS G13D)
YVVQATDVV

SEQ ID NO: 98405 - protein, 9 aa, synthetic construct
  source 1..9: note = Seed: VVVGAGDVG (KRAS G13D)
YVVQATDVW

SEQ ID NO: 98406 - protein, 9 aa, synthetic construct
  source 1..9: note = Seed: VVVGAGDVG (KRAS G13D)
YVVQATDVY

SEQ ID NO: 98407 - protein, 9 aa, synthetic construct
  source 1..9: note = Seed: VVVGAGDVG (KRAS G13D)
YVVQAVDVA

SEQ ID NO: 98408 - protein, 9 aa, synthetic construct
  source 1..9: note = Seed: VVVGAGDVG (KRAS G13D)
YVVQAVDVC

SEQ ID NO: 98409 - protein, 9 aa, synthetic construct
  source 1..9: note = Seed: VVVGAGDVG (KRAS G13D)
YVVQAVDVD

SEQ ID NO: 98410 - protein, 9 aa, synthetic construct
  source 1..9: note = Seed: VVVGAGDVG (KRAS G13D)
YVVQAVDVE

SEQ ID NO: 98411 - protein, 9 aa, synthetic construct
  source 1..9: note = Seed: VVVGAGDVG (KRAS G13D)
YVVQAVDVF

SEQ ID NO: 98412 - protein, 9 aa, synthetic construct
  source 1..9: note = Seed: VVVGAGDVG (KRAS G13D)
YVVQAVDVG

SEQ ID NO: 98413 - protein, 9 aa, synthetic construct
  source 1..9: note = Seed: VVVGAGDVG (KRAS G13D)
YVVQAVDVH

SEQ ID NO: 98414 - protein, 9 aa, synthetic construct
  source 1..9: note = Seed: VVVGAGDVG (KRAS G13D)
YVVQAVDVI

SEQ ID NO: 98415 - protein, 9 aa, synthetic construct
  source 1..9: note = Seed: VVVGAGDVG (KRAS G13D)
YVVQAVDVK

SEQ ID NO: 98416 - protein, 9 aa, synthetic construct
  source 1..9: note = Seed: VVVGAGDVG (KRAS G13D)
YVVQAVDVL

SEQ ID NO: 98417 - protein, 9 aa, synthetic construct
  source 1..9: note = Seed: VVVGAGDVG (KRAS G13D)
YVVQAVDVM

SEQ ID NO: 98418 - protein, 9 aa, synthetic construct
  source 1..9: note = Seed: VVVGAGDVG (KRAS G13D)
YVVQAVDVN

SEQ ID NO: 98419 - protein, 9 aa, synthetic construct
  source 1..9: note = Seed: VVVGAGDVG (KRAS G13D)
YVVQAVDVP

SEQ ID NO: 98420 - protein, 9 aa, synthetic construct
  source 1..9: note = Seed: VVVGAGDVG (KRAS G13D)
YVVQAVDVQ

SEQ ID NO: 98421 - protein, 9 aa, synthetic construct
  source 1..9: note = Seed: VVVGAGDVG (KRAS G13D)
YVVQAVDVR

SEQ ID NO: 98422 - protein, 9 aa, synthetic construct
  source 1..9: note = Seed: VVVGAGDVG (KRAS G13D)
YVVQAVDVS

SEQ ID NO: 98423 - protein, 9 aa, synthetic construct
  source 1..9: note = Seed: VVVGAGDVG (KRAS G13D)
YVVQAVDVT

SEQ ID NO: 98424 - protein, 9 aa, synthetic construct
  source 1..9: note = Seed: VVVGAGDVG (KRAS G13D)
YVVQAVDVV

SEQ ID NO: 98425 - protein, 9 aa, synthetic construct
  source 1..9: note = Seed: VVVGAGDVG (KRAS G13D)
YVVQAVDVW

SEQ ID NO: 98426 - protein, 9 aa, synthetic construct
  source 1..9: note = Seed: VVVGAGDVG (KRAS G13D)
YVVQAVDVY

SEQ ID NO: 98427 - protein, 9 aa, synthetic construct
  source 1..9: note = Seed: VVVGAGDVG (KRAS G13D)
YVVQAYDVA

SEQ ID NO: 98428 - protein, 9 aa, synthetic construct
  source 1..9: note = Seed: VVVGAGDVG (KRAS G13D)
YVVRAADVA

SEQ ID NO: 98429 - protein, 9 aa, synthetic construct
  source 1..9: note = Seed: VVVGAGDVG (KRAS G13D)
YVVRAADVC

SEQ ID NO: 98430 - protein, 9 aa, synthetic construct
  source 1..9: note = Seed: VVVGAGDVG (KRAS G13D)
YVVRAADVD

SEQ ID NO: 98431 - protein, 9 aa, synthetic construct
  source 1..9: note = Seed: VVVGAGDVG (KRAS G13D)
YVVRAADVG

SEQ ID NO: 98432 - protein, 9 aa, synthetic construct
  source 1..9: note = Seed: VVVGAGDVG (KRAS G13D)
YVVRAADVI

SEQ ID NO: 98433 - protein, 9 aa, synthetic construct
  source 1..9: note = Seed: VVVGAGDVG (KRAS G13D)
YVVRAADVL

SEQ ID NO: 98434 - protein, 9 aa, synthetic construct
  source 1..9: note = Seed: VVVGAGDVG (KRAS G13D)
YVVRAADVM

SEQ ID NO: 98435 - protein, 9 aa, synthetic construct
  source 1..9: note = Seed: VVVGAGDVG (KRAS G13D)
YVVRAADVN

SEQ ID NO: 98436 - protein, 9 aa, synthetic construct
  source 1..9: note = Seed: VVVGAGDVG (KRAS G13D)
YVVRAADVS

SEQ ID NO: 98437 - protein, 9 aa, synthetic construct
  source 1..9: note = Seed: VVVGAGDVG (KRAS G13D)
YVVRAADVV

SEQ ID NO: 98438 - protein, 9 aa, synthetic construct
  source 1..9: note = Seed: VVVGAGDVG (KRAS G13D)
YVVRAGDVA

SEQ ID NO: 98439 - protein, 9 aa, synthetic construct
  source 1..9: note = Seed: VVVGAGDVG (KRAS G13D)
YVVRAGDVL

SEQ ID NO: 98440 - protein, 9 aa, synthetic construct
  source 1..9: note = Seed: VVVGAGDVG (KRAS G13D)
YVVRAGDVV

SEQ ID NO: 98441 - protein, 9 aa, synthetic construct
  source 1..9: note = Seed: VVVGAGDVG (KRAS G13D)
YVVRANDVA

SEQ ID NO: 98442 - protein, 9 aa, synthetic construct
  source 1..9: note = Seed: VVVGAGDVG (KRAS G13D)
YVVRANDVL

SEQ ID NO: 98443 - protein, 9 aa, synthetic construct
  source 1..9: note = Seed: VVVGAGDVG (KRAS G13D)
YVVRANDVM

SEQ ID NO: 98444 - protein, 9 aa, synthetic construct
  source 1..9: note = Seed: VVVGAGDVG (KRAS G13D)
YVVRANDVN

SEQ ID NO: 98445 - protein, 9 aa, synthetic construct
  source 1..9: note = Seed: VVVGAGDVG (KRAS G13D)
YVVRANDVS

SEQ ID NO: 98446 - protein, 9 aa, synthetic construct
  source 1..9: note = Seed: VVVGAGDVG (KRAS G13D)
YVVRAPDVA

SEQ ID NO: 98447 - protein, 9 aa, synthetic construct
  source 1..9: note = Seed: VVVGAGDVG (KRAS G13D)
YVVRAPDVI

SEQ ID NO: 98448 - protein, 9 aa, synthetic construct
  source 1..9: note = Seed: VVVGAGDVG (KRAS G13D)
YVVRAPDVL

SEQ ID NO: 98449 - protein, 9 aa, synthetic construct
  source 1..9: note = Seed: VVVGAGDVG (KRAS G13D)
YVVRAPDVM

SEQ ID NO: 98450 - protein, 9 aa, synthetic construct
  source 1..9: note = Seed: VVVGAGDVG (KRAS G13D)
YVVRAPDVN

SEQ ID NO: 98451 - protein, 9 aa, synthetic construct
  source 1..9: note = Seed: VVVGAGDVG (KRAS G13D)
YVVRAPDVS

SEQ ID NO: 98452 - protein, 9 aa, synthetic construct
  source 1..9: note = Seed: VVVGAGDVG (KRAS G13D)
YVVRAPDVV

SEQ ID NO: 98453 - protein, 9 aa, synthetic construct
  source 1..9: note = Seed: VVVGAGDVG (KRAS G13D)
YVVRASDVA

SEQ ID NO: 98454 - protein, 9 aa, synthetic construct
  source 1..9: note = Seed: VVVGAGDVG (KRAS G13D)
YVVRASDVC

SEQ ID NO: 98455 - protein, 9 aa, synthetic construct
  source 1..9: note = Seed: VVVGAGDVG (KRAS G13D)
YVVRASDVD

SEQ ID NO: 98456 - protein, 9 aa, synthetic construct
  source 1..9: note = Seed: VVVGAGDVG (KRAS G13D)
YVVRASDVG

SEQ ID NO: 98457 - protein, 9 aa, synthetic construct
  source 1..9: note = Seed: VVVGAGDVG (KRAS G13D)
YVVRASDVI

SEQ ID NO: 98458 - protein, 9 aa, synthetic construct
  source 1..9: note = Seed: VVVGAGDVG (KRAS G13D)
YVVRASDVL

SEQ ID NO: 98459 - protein, 9 aa, synthetic construct
  source 1..9: note = Seed: VVVGAGDVG (KRAS G13D)
YVVRASDVM

SEQ ID NO: 98460 - protein, 9 aa, synthetic construct
  source 1..9: note = Seed: VVVGAGDVG (KRAS G13D)
YVVRASDVN

SEQ ID NO: 98461 - protein, 9 aa, synthetic construct
  source 1..9: note = Seed: VVVGAGDVG (KRAS G13D)
YVVRASDVQ

SEQ ID NO: 98462 - protein, 9 aa, synthetic construct
  source 1..9: note = Seed: VVVGAGDVG (KRAS G13D)
YVVRASDVS

SEQ ID NO: 98463 - protein, 9 aa, synthetic construct
  source 1..9: note = Seed: VVVGAGDVG (KRAS G13D)
YVVRASDVT

SEQ ID NO: 98464 - protein, 9 aa, synthetic construct
  source 1..9: note = Seed: VVVGAGDVG (KRAS G13D)
YVVRASDVV

SEQ ID NO: 98465 - protein, 9 aa, synthetic construct
  source 1..9: note = Seed: VVVGAGDVG (KRAS G13D)
YVVRATDVA

SEQ ID NO: 98466 - protein, 9 aa, synthetic construct
  source 1..9: note = Seed: VVVGAGDVG (KRAS G13D)
YVVRATDVI

SEQ ID NO: 98467 - protein, 9 aa, synthetic construct
  source 1..9: note = Seed: VVVGAGDVG (KRAS G13D)
YVVRATDVL

SEQ ID NO: 98468 - protein, 9 aa, synthetic construct
  source 1..9: note = Seed: VVVGAGDVG (KRAS G13D)
YVVRATDVM

SEQ ID NO: 98469 - protein, 9 aa, synthetic construct
  source 1..9: note = Seed: VVVGAGDVG (KRAS G13D)
YVVRATDVN

SEQ ID NO: 98470 - protein, 9 aa, synthetic construct
  source 1..9: note = Seed: VVVGAGDVG (KRAS G13D)
YVVRATDVQ

SEQ ID NO: 98471 - protein, 9 aa, synthetic construct
  source 1..9: note = Seed: VVVGAGDVG (KRAS G13D)
YVVRATDVS

SEQ ID NO: 98472 - protein, 9 aa, synthetic construct
  source 1..9: note = Seed: VVVGAGDVG (KRAS G13D)
YVVRATDVT

SEQ ID NO: 98473 - protein, 9 aa, synthetic construct
  source 1..9: note = Seed: VVVGAGDVG (KRAS G13D)
YVVRATDVV

SEQ ID NO: 98474 - protein, 9 aa, synthetic construct
  source 1..9: note = Seed: VVVGAGDVG (KRAS G13D)
YVVRAVDVC

SEQ ID NO: 98475 - protein, 9 aa, synthetic construct
  source 1..9: note = Seed: VVVGAGDVG (KRAS G13D)
YVVRAVDVG

SEQ ID NO: 98476 - protein, 9 aa, synthetic construct
  source 1..9: note = Seed: VVVGAGDVG (KRAS G13D)
YVVRAVDVS

SEQ ID NO: 98477 - protein, 9 aa, synthetic construct
  source 1..9: note = Seed: VVVGAGDVG (KRAS G13D)
YVVSAADVA

SEQ ID NO: 98478 - protein, 9 aa, synthetic construct
  source 1..9: note = Seed: VVVGAGDVG (KRAS G13D)
YVVSAADVC

SEQ ID NO: 98479 - protein, 9 aa, synthetic construct
  source 1..9: note = Seed: VVVGAGDVG (KRAS G13D)
YVVSAADVD

SEQ ID NO: 98480 - protein, 9 aa, synthetic construct
  source 1..9: note = Seed: VVVGAGDVG (KRAS G13D)
YVVSAADVE

SEQ ID NO: 98481 - protein, 9 aa, synthetic construct
  source 1..9: note = Seed: VVVGAGDVG (KRAS G13D)
YVVSAADVF

SEQ ID NO: 98482 - protein, 9 aa, synthetic construct
  source 1..9: note = Seed: VVVGAGDVG (KRAS G13D)
YVVSAADVG

SEQ ID NO: 98483 - protein, 9 aa, synthetic construct
  source 1..9: note = Seed: VVVGAGDVG (KRAS G13D)
YVVSAADVH

SEQ ID NO: 98484 - protein, 9 aa, synthetic construct
  source 1..9: note = Seed: VVVGAGDVG (KRAS G13D)
YVVSAADVI

SEQ ID NO: 98485 - protein, 9 aa, synthetic construct
  source 1..9: note = Seed: VVVGAGDVG (KRAS G13D)
YVVSAADVK

SEQ ID NO: 98486 - protein, 9 aa, synthetic construct
  source 1..9: note = Seed: VVVGAGDVG (KRAS G13D)
YVVSAADVL

SEQ ID NO: 98487 - protein, 9 aa, synthetic construct
  source 1..9: note = Seed: VVVGAGDVG (KRAS G13D)
YVVSAADVM

SEQ ID NO: 98488 - protein, 9 aa, synthetic construct
  source 1..9: note = Seed: VVVGAGDVG (KRAS G13D)
YVVSAADVN

SEQ ID NO: 98489 - protein, 9 aa, synthetic construct
  source 1..9: note = Seed: VVVGAGDVG (KRAS G13D)
YVVSAADVP

SEQ ID NO: 98490 - protein, 9 aa, synthetic construct
  source 1..9: note = Seed: VVVGAGDVG (KRAS G13D)
YVVSAADVQ

SEQ ID NO: 98491 - protein, 9 aa, synthetic construct
  source 1..9: note = Seed: VVVGAGDVG (KRAS G13D)
YVVSAADVR

SEQ ID NO: 98492 - protein, 9 aa, synthetic construct
  source 1..9: note = Seed: VVVGAGDVG (KRAS G13D)
YVVSAADVS

SEQ ID NO: 98493 - protein, 9 aa, synthetic construct
  source 1..9: note = Seed: VVVGAGDVG (KRAS G13D)
YVVSAADVT

SEQ ID NO: 98494 - protein, 9 aa, synthetic construct
  source 1..9: note = Seed: VVVGAGDVG (KRAS G13D)
YVVSAADVV

SEQ ID NO: 98495 - protein, 9 aa, synthetic construct
  source 1..9: note = Seed: VVVGAGDVG (KRAS G13D)
YVVSAADVW

SEQ ID NO: 98496 - protein, 9 aa, synthetic construct
  source 1..9: note = Seed: VVVGAGDVG (KRAS G13D)
YVVSAADVY

SEQ ID NO: 98497 - protein, 9 aa, synthetic construct
  source 1..9: note = Seed: VVVGAGDVG (KRAS G13D)
YVVSACDVA

SEQ ID NO: 98498 - protein, 9 aa, synthetic construct
  source 1..9: note = Seed: VVVGAGDVG (KRAS G13D)
YVVSACDVN

SEQ ID NO: 98499 - protein, 9 aa, synthetic construct
  source 1..9: note = Seed: VVVGAGDVG (KRAS G13D)
YVVSADDVA

SEQ ID NO: 98500 - protein, 9 aa, synthetic construct
  source 1..9: note = Seed: VVVGAGDVG (KRAS G13D)
YVVSADDVS

SEQ ID NO: 98501 - protein, 9 aa, synthetic construct
  source 1..9: note = Seed: VVVGAGDVG (KRAS G13D)
YVVSAEDVA

SEQ ID NO: 98502 - protein, 9 aa, synthetic construct
  source 1..9: note = Seed: VVVGAGDVG (KRAS G13D)
YVVSAEDVL

SEQ ID NO: 98503 - protein, 9 aa, synthetic construct
  source 1..9: note = Seed: VVVGAGDVG (KRAS G13D)
YVVSAEDVS

SEQ ID NO: 98504 - protein, 9 aa, synthetic construct
  source 1..9: note = Seed: VVVGAGDVG (KRAS G13D)
YVVSAEDVV

SEQ ID NO: 98505 - protein, 9 aa, synthetic construct
  source 1..9: note = Seed: VVVGAGDVG (KRAS G13D)
YVVSAFDVA

SEQ ID NO: 98506 - protein, 9 aa, synthetic construct
  source 1..9: note = Seed: VVVGAGDVG (KRAS G13D)
YVVSAFDVM

SEQ ID NO: 98507 - protein, 9 aa, synthetic construct
  source 1..9: note = Seed: VVVGAGDVG (KRAS G13D)
YVVSAFDVN

SEQ ID NO: 98508 - protein, 9 aa, synthetic construct
  source 1..9: note = Seed: VVVGAGDVG (KRAS G13D)
YVVSAFDVS

SEQ ID NO: 98509 - protein, 9 aa, synthetic construct
  source 1..9: note = Seed: VVVGAGDVG (KRAS G13D)
YVVSAGDVA

SEQ ID NO: 98510 - protein, 9 aa, synthetic construct
  source 1..9: note = Seed: VVVGAGDVG (KRAS G13D)
YVVSAGDVF

SEQ ID NO: 98511 - protein, 9 aa, synthetic construct
  source 1..9: note = Seed: VVVGAGDVG (KRAS G13D)
YVVSAGDVG

SEQ ID NO: 98512 - protein, 9 aa, synthetic construct
  source 1..9: note = Seed: VVVGAGDVG (KRAS G13D)
YVVSAGDVH

SEQ ID NO: 98513 - protein, 9 aa, synthetic construct
  source 1..9: note = Seed: VVVGAGDVG (KRAS G13D)
YVVSAGDVI

SEQ ID NO: 98514 - protein, 9 aa, synthetic construct
  source 1..9: note = Seed: VVVGAGDVG (KRAS G13D)
YVVSAGDVL

SEQ ID NO: 98515 - protein, 9 aa, synthetic construct
  source 1..9: note = Seed: VVVGAGDVG (KRAS G13D)
YVVSAGDVM

SEQ ID NO: 98516 - protein, 9 aa, synthetic construct
  source 1..9: note = Seed: VVVGAGDVG (KRAS G13D)
YVVSAGDVN

SEQ ID NO: 98517 - protein, 9 aa, synthetic construct
  source 1..9: note = Seed: VVVGAGDVG (KRAS G13D)
YVVSAGDVQ

SEQ ID NO: 98518 - protein, 9 aa, synthetic construct
  source 1..9: note = Seed: VVVGAGDVG (KRAS G13D)
YVVSAGDVS

SEQ ID NO: 98519 - protein, 9 aa, synthetic construct
  source 1..9: note = Seed: VVVGAGDVG (KRAS G13D)
YVVSAGDVT

SEQ ID NO: 98520 - protein, 9 aa, synthetic construct
  source 1..9: note = Seed: VVVGAGDVG (KRAS G13D)
YVVSAGDVV

SEQ ID NO: 98521 - protein, 9 aa, synthetic construct
  source 1..9: note = Seed: VVVGAGDVG (KRAS G13D)
YVVSAGDVY

SEQ ID NO: 98522 - protein, 9 aa, synthetic construct
  source 1..9: note = Seed: VVVGAGDVG (KRAS G13D)
YVVSAHDVA

SEQ ID NO: 98523 - protein, 9 aa, synthetic construct
  source 1..9: note = Seed: VVVGAGDVG (KRAS G13D)
YVVSAHDVI

SEQ ID NO: 98524 - protein, 9 aa, synthetic construct
  source 1..9: note = Seed: VVVGAGDVG (KRAS G13D)
YVVSAHDVL

SEQ ID NO: 98525 - protein, 9 aa, synthetic construct
  source 1..9: note = Seed: VVVGAGDVG (KRAS G13D)
YVVSAHDVM

SEQ ID NO: 98526 - protein, 9 aa, synthetic construct
  source 1..9: note = Seed: VVVGAGDVG (KRAS G13D)
YVVSAHDVN

SEQ ID NO: 98527 - protein, 9 aa, synthetic construct
  source 1..9: note = Seed: VVVGAGDVG (KRAS G13D)
YVVSAHDVQ

SEQ ID NO: 98528 - protein, 9 aa, synthetic construct
  source 1..9: note = Seed: VVVGAGDVG (KRAS G13D)
YVVSAHDVS

SEQ ID NO: 98529 - protein, 9 aa, synthetic construct
  source 1..9: note = Seed: VVVGAGDVG (KRAS G13D)
YVVSAHDVT

SEQ ID NO: 98530 - protein, 9 aa, synthetic construct
  source 1..9: note = Seed: VVVGAGDVG (KRAS G13D)
YVVSAHDVV

SEQ ID NO: 98531 - protein, 9 aa, synthetic construct
  source 1..9: note = Seed: VVVGAGDVG (KRAS G13D)
YVVSAIDVA

SEQ ID NO: 98532 - protein, 9 aa, synthetic construct
  source 1..9: note = Seed: VVVGAGDVG (KRAS G13D)
YVVSAIDVC

SEQ ID NO: 98533 - protein, 9 aa, synthetic construct
  source 1..9: note = Seed: VVVGAGDVG (KRAS G13D)
YVVSAIDVD

SEQ ID NO: 98534 - protein, 9 aa, synthetic construct
  source 1..9: note = Seed: VVVGAGDVG (KRAS G13D)
YVVSAIDVE

SEQ ID NO: 98535 - protein, 9 aa, synthetic construct
  source 1..9: note = Seed: VVVGAGDVG (KRAS G13D)
YVVSAIDVG

SEQ ID NO: 98536 - protein, 9 aa, synthetic construct
  source 1..9: note = Seed: VVVGAGDVG (KRAS G13D)
YVVSAIDVH

SEQ ID NO: 98537 - protein, 9 aa, synthetic construct
  source 1..9: note = Seed: VVVGAGDVG (KRAS G13D)
YVVSAIDVI

SEQ ID NO: 98538 - protein, 9 aa, synthetic construct
  source 1..9: note = Seed: VVVGAGDVG (KRAS G13D)
YVVSAIDVL

SEQ ID NO: 98539 - protein, 9 aa, synthetic construct
  source 1..9: note = Seed: VVVGAGDVG (KRAS G13D)
YVVSAIDVM

SEQ ID NO: 98540 - protein, 9 aa, synthetic construct
  source 1..9: note = Seed: VVVGAGDVG (KRAS G13D)
YVVSAIDVN

SEQ ID NO: 98541 - protein, 9 aa, synthetic construct
  source 1..9: note = Seed: VVVGAGDVG (KRAS G13D)
YVVSAIDVP

SEQ ID NO: 98542 - protein, 9 aa, synthetic construct
  source 1..9: note = Seed: VVVGAGDVG (KRAS G13D)
YVVSAIDVQ

SEQ ID NO: 98543 - protein, 9 aa, synthetic construct
  source 1..9: note = Seed: VVVGAGDVG (KRAS G13D)
YVVSAIDVS

SEQ ID NO: 98544 - protein, 9 aa, synthetic construct
  source 1..9: note = Seed: VVVGAGDVG (KRAS G13D)
YVVSAIDVT

SEQ ID NO: 98545 - protein, 9 aa, synthetic construct
  source 1..9: note = Seed: VVVGAGDVG (KRAS G13D)
YVVSAIDVV

SEQ ID NO: 98546 - protein, 9 aa, synthetic construct
  source 1..9: note = Seed: VVVGAGDVG (KRAS G13D)
YVVSAIDVY

SEQ ID NO: 98547 - protein, 9 aa, synthetic construct
  source 1..9: note = Seed: VVVGAGDVG (KRAS G13D)
YVVSALDVA

SEQ ID NO: 98548 - protein, 9 aa, synthetic construct
  source 1..9: note = Seed: VVVGAGDVG (KRAS G13D)
YVVSALDVC

SEQ ID NO: 98549 - protein, 9 aa, synthetic construct
  source 1..9: note = Seed: VVVGAGDVG (KRAS G13D)
YVVSALDVG

SEQ ID NO: 98550 - protein, 9 aa, synthetic construct
  source 1..9: note = Seed: VVVGAGDVG (KRAS G13D)
YVVSALDVS

SEQ ID NO: 98551 - protein, 9 aa, synthetic construct
  source 1..9: note = Seed: VVVGAGDVG (KRAS G13D)
YVVSALDVT

SEQ ID NO: 98552 - protein, 9 aa, synthetic construct
  source 1..9: note = Seed: VVVGAGDVG (KRAS G13D)
YVVSAMDVC

SEQ ID NO: 98553 - protein, 9 aa, synthetic construct
  source 1..9: note = Seed: VVVGAGDVG (KRAS G13D)
YVVSAMDVG

SEQ ID NO: 98554 - protein, 9 aa, synthetic construct
  source 1..9: note = Seed: VVVGAGDVG (KRAS G13D)
YVVSAMDVS

SEQ ID NO: 98555 - protein, 9 aa, synthetic construct
  source 1..9: note = Seed: VVVGAGDVG (KRAS G13D)
YVVSANDVA

SEQ ID NO: 98556 - protein, 9 aa, synthetic construct
  source 1..9: note = Seed: VVVGAGDVG (KRAS G13D)
YVVSANDVC

SEQ ID NO: 98557 - protein, 9 aa, synthetic construct
  source 1..9: note = Seed: VVVGAGDVG (KRAS G13D)
YVVSANDVD

SEQ ID NO: 98558 - protein, 9 aa, synthetic construct
  source 1..9: note = Seed: VVVGAGDVG (KRAS G13D)
YVVSANDVE

SEQ ID NO: 98559 - protein, 9 aa, synthetic construct
  source 1..9: note = Seed: VVVGAGDVG (KRAS G13D)
YVVSANDVG

SEQ ID NO: 98560 - protein, 9 aa, synthetic construct
  source 1..9: note = Seed: VVVGAGDVG (KRAS G13D)
YVVSANDVH

SEQ ID NO: 98561 - protein, 9 aa, synthetic construct
  source 1..9: note = Seed: VVVGAGDVG (KRAS G13D)
YVVSANDVI

SEQ ID NO: 98562 - protein, 9 aa, synthetic construct
  source 1..9: note = Seed: VVVGAGDVG (KRAS G13D)
YVVSANDVL

SEQ ID NO: 98563 - protein, 9 aa, synthetic construct
  source 1..9: note = Seed: VVVGAGDVG (KRAS G13D)
YVVSANDVM

SEQ ID NO: 98564 - protein, 9 aa, synthetic construct
  source 1..9: note = Seed: VVVGAGDVG (KRAS G13D)
YVVSANDVN

SEQ ID NO: 98565 - protein, 9 aa, synthetic construct
  source 1..9: note = Seed: VVVGAGDVG (KRAS G13D)
YVVSANDVP

SEQ ID NO: 98566 - protein, 9 aa, synthetic construct
  source 1..9: note = Seed: VVVGAGDVG (KRAS G13D)
YVVSANDVQ

SEQ ID NO: 98567 - protein, 9 aa, synthetic construct
  source 1..9: note = Seed: VVVGAGDVG (KRAS G13D)
YVVSANDVS

SEQ ID NO: 98568 - protein, 9 aa, synthetic construct
  source 1..9: note = Seed: VVVGAGDVG (KRAS G13D)
YVVSANDVT

SEQ ID NO: 98569 - protein, 9 aa, synthetic construct
  source 1..9: note = Seed: VVVGAGDVG (KRAS G13D)
YVVSANDVV

SEQ ID NO: 98570 - protein, 9 aa, synthetic construct
  source 1..9: note = Seed: VVVGAGDVG (KRAS G13D)
YVVSANDVY

SEQ ID NO: 98571 - protein, 9 aa, synthetic construct
  source 1..9: note = Seed: VVVGAGDVG (KRAS G13D)
YVVSAPDVA

SEQ ID NO: 98572 - protein, 9 aa, synthetic construct
  source 1..9: note = Seed: VVVGAGDVG (KRAS G13D)
YVVSAPDVC

SEQ ID NO: 98573 - protein, 9 aa, synthetic construct
  source 1..9: note = Seed: VVVGAGDVG (KRAS G13D)
YVVSAPDVD

SEQ ID NO: 98574 - protein, 9 aa, synthetic construct
  source 1..9: note = Seed: VVVGAGDVG (KRAS G13D)
YVVSAPDVE

SEQ ID NO: 98575 - protein, 9 aa, synthetic construct
  source 1..9: note = Seed: VVVGAGDVG (KRAS G13D)
YVVSAPDVF

SEQ ID NO: 98576 - protein, 9 aa, synthetic construct
  source 1..9: note = Seed: VVVGAGDVG (KRAS G13D)
YVVSAPDVG

SEQ ID NO: 98577 - protein, 9 aa, synthetic construct
  source 1..9: note = Seed: VVVGAGDVG (KRAS G13D)
YVVSAPDVH

SEQ ID NO: 98578 - protein, 9 aa, synthetic construct
  source 1..9: note = Seed: VVVGAGDVG (KRAS G13D)
YVVSAPDVI

SEQ ID NO: 98579 - protein, 9 aa, synthetic construct
  source 1..9: note = Seed: VVVGAGDVG (KRAS G13D)
YVVSAPDVK

SEQ ID NO: 98580 - protein, 9 aa, synthetic construct
  source 1..9: note = Seed: VVVGAGDVG (KRAS G13D)
YVVSAPDVL

SEQ ID NO: 98581 - protein, 9 aa, synthetic construct
  source 1..9: note = Seed: VVVGAGDVG (KRAS G13D)
YVVSAPDVM

SEQ ID NO: 98582 - protein, 9 aa, synthetic construct
  source 1..9: note = Seed: VVVGAGDVG (KRAS G13D)
YVVSAPDVN

SEQ ID NO: 98583 - protein, 9 aa, synthetic construct
  source 1..9: note = Seed: VVVGAGDVG (KRAS G13D)
YVVSAPDVP

SEQ ID NO: 98584 - protein, 9 aa, synthetic construct
  source 1..9: note = Seed: VVVGAGDVG (KRAS G13D)
YVVSAPDVQ

SEQ ID NO: 98585 - protein, 9 aa, synthetic construct
  source 1..9: note = Seed: VVVGAGDVG (KRAS G13D)
YVVSAPDVR

SEQ ID NO: 98586 - protein, 9 aa, synthetic construct
  source 1..9: note = Seed: VVVGAGDVG (KRAS G13D)
YVVSAPDVS

SEQ ID NO: 98587 - protein, 9 aa, synthetic construct
  source 1..9: note = Seed: VVVGAGDVG (KRAS G13D)
YVVSAPDVT

SEQ ID NO: 98588 - protein, 9 aa, synthetic construct
  source 1..9: note = Seed: VVVGAGDVG (KRAS G13D)
YVVSAPDVV

SEQ ID NO: 98589 - protein, 9 aa, synthetic construct
  source 1..9: note = Seed: VVVGAGDVG (KRAS G13D)
YVVSAPDVW

SEQ ID NO: 98590 - protein, 9 aa, synthetic construct
  source 1..9: note = Seed: VVVGAGDVG (KRAS G13D)
YVVSAPDVY

SEQ ID NO: 98591 - protein, 9 aa, synthetic construct
  source 1..9: note = Seed: VVVGAGDVG (KRAS G13D)
YVVSAQDVA

SEQ ID NO: 98592 - protein, 9 aa, synthetic construct
  source 1..9: note = Seed: VVVGAGDVG (KRAS G13D)
YVVSAQDVG

SEQ ID NO: 98593 - protein, 9 aa, synthetic construct
  source 1..9: note = Seed: VVVGAGDVG (KRAS G13D)
YVVSAQDVI

SEQ ID NO: 98594 - protein, 9 aa, synthetic construct
  source 1..9: note = Seed: VVVGAGDVG (KRAS G13D)
YVVSAQDVL

SEQ ID NO: 98595 - protein, 9 aa, synthetic construct
  source 1..9: note = Seed: VVVGAGDVG (KRAS G13D)
YVVSAQDVM

SEQ ID NO: 98596 - protein, 9 aa, synthetic construct
  source 1..9: note = Seed: VVVGAGDVG (KRAS G13D)
YVVSAQDVN

SEQ ID NO: 98597 - protein, 9 aa, synthetic construct
  source 1..9: note = Seed: VVVGAGDVG (KRAS G13D)
YVVSAQDVQ

SEQ ID NO: 98598 - protein, 9 aa, synthetic construct
  source 1..9: note = Seed: VVVGAGDVG (KRAS G13D)
YVVSAQDVS

SEQ ID NO: 98599 - protein, 9 aa, synthetic construct
  source 1..9: note = Seed: VVVGAGDVG (KRAS G13D)
YVVSAQDVT

SEQ ID NO: 98600 - protein, 9 aa, synthetic construct
  source 1..9: note = Seed: VVVGAGDVG (KRAS G13D)
YVVSAQDVV

SEQ ID NO: 98601 - protein, 9 aa, synthetic construct
  source 1..9: note = Seed: VVVGAGDVG (KRAS G13D)
YVVSARDVA

SEQ ID NO: 98602 - protein, 9 aa, synthetic construct
  source 1..9: note = Seed: VVVGAGDVG (KRAS G13D)
YVVSARDVL

SEQ ID NO: 98603 - protein, 9 aa, synthetic construct
  source 1..9: note = Seed: VVVGAGDVG (KRAS G13D)
YVVSARDVV

SEQ ID NO: 98604 - protein, 9 aa, synthetic construct
  source 1..9: note = Seed: VVVGAGDVG (KRAS G13D)
YVVSASDVA

SEQ ID NO: 98605 - protein, 9 aa, synthetic construct
  source 1..9: note = Seed: VVVGAGDVG (KRAS G13D)
YVVSASDVC

SEQ ID NO: 98606 - protein, 9 aa, synthetic construct
  source 1..9: note = Seed: VVVGAGDVG (KRAS G13D)
YVVSASDVD

SEQ ID NO: 98607 - protein, 9 aa, synthetic construct
  source 1..9: note = Seed: VVVGAGDVG (KRAS G13D)
YVVSASDVE

SEQ ID NO: 98608 - protein, 9 aa, synthetic construct
  source 1..9: note = Seed: VVVGAGDVG (KRAS G13D)
YVVSASDVF

SEQ ID NO: 98609 - protein, 9 aa, synthetic construct
  source 1..9: note = Seed: VVVGAGDVG (KRAS G13D)
YVVSASDVG

SEQ ID NO: 98610 - protein, 9 aa, synthetic construct
  source 1..9: note = Seed: VVVGAGDVG (KRAS G13D)
YVVSASDVH

SEQ ID NO: 98611 - protein, 9 aa, synthetic construct
  source 1..9: note = Seed: VVVGAGDVG (KRAS G13D)
YVVSASDVI

SEQ ID NO: 98612 - protein, 9 aa, synthetic construct
  source 1..9: note = Seed: VVVGAGDVG (KRAS G13D)
YVVSASDVK

SEQ ID NO: 98613 - protein, 9 aa, synthetic construct
  source 1..9: note = Seed: VVVGAGDVG (KRAS G13D)
YVVSASDVL

SEQ ID NO: 98614 - protein, 9 aa, synthetic construct
  source 1..9: note = Seed: VVVGAGDVG (KRAS G13D)
YVVSASDVM

SEQ ID NO: 98615 - protein, 9 aa, synthetic construct
  source 1..9: note = Seed: VVVGAGDVG (KRAS G13D)
YVVSASDVN

SEQ ID NO: 98616 - protein, 9 aa, synthetic construct
  source 1..9: note = Seed: VVVGAGDVG (KRAS G13D)
YVVSASDVP

SEQ ID NO: 98617 - protein, 9 aa, synthetic construct
  source 1..9: note = Seed: VVVGAGDVG (KRAS G13D)
YVVSASDVQ

SEQ ID NO: 98618 - protein, 9 aa, synthetic construct
  source 1..9: note = Seed: VVVGAGDVG (KRAS G13D)
YVVSASDVR

SEQ ID NO: 98619 - protein, 9 aa, synthetic construct
  source 1..9: note = Seed: VVVGAGDVG (KRAS G13D)
YVVSASDVS

SEQ ID NO: 98620 - protein, 9 aa, synthetic construct
  source 1..9: note = Seed: VVVGAGDVG (KRAS G13D)
YVVSASDVT

SEQ ID NO: 98621 - protein, 9 aa, synthetic construct
  source 1..9: note = Seed: VVVGAGDVG (KRAS G13D)
YVVSASDVV

SEQ ID NO: 98622 - protein, 9 aa, synthetic construct
  source 1..9: note = Seed: VVVGAGDVG (KRAS G13D)
YVVSASDVW

SEQ ID NO: 98623 - protein, 9 aa, synthetic construct
  source 1..9: note = Seed: VVVGAGDVG (KRAS G13D)
YVVSASDVY

SEQ ID NO: 98624 - protein, 9 aa, synthetic construct
  source 1..9: note = Seed: VVVGAGDVG (KRAS G13D)
YVVSATDVA

SEQ ID NO: 98625 - protein, 9 aa, synthetic construct
  source 1..9: note = Seed: VVVGAGDVG (KRAS G13D)
YVVSATDVC

SEQ ID NO: 98626 - protein, 9 aa, synthetic construct
  source 1..9: note = Seed: VVVGAGDVG (KRAS G13D)
YVVSATDVE

SEQ ID NO: 98627 - protein, 9 aa, synthetic construct
  source 1..9: note = Seed: VVVGAGDVG (KRAS G13D)
YVVSATDVF

SEQ ID NO: 98628 - protein, 9 aa, synthetic construct
  source 1..9: note = Seed: VVVGAGDVG (KRAS G13D)
YVVSATDVG

SEQ ID NO: 98629 - protein, 9 aa, synthetic construct
  source 1..9: note = Seed: VVVGAGDVG (KRAS G13D)
YVVSATDVH

SEQ ID NO: 98630 - protein, 9 aa, synthetic construct
  source 1..9: note = Seed: VVVGAGDVG (KRAS G13D)
YVVSATDVI

SEQ ID NO: 98631 - protein, 9 aa, synthetic construct
  source 1..9: note = Seed: VVVGAGDVG (KRAS G13D)
YVVSATDVK

SEQ ID NO: 98632 - protein, 9 aa, synthetic construct
  source 1..9: note = Seed: VVVGAGDVG (KRAS G13D)
YVVSATDVL

SEQ ID NO: 98633 - protein, 9 aa, synthetic construct
  source 1..9: note = Seed: VVVGAGDVG (KRAS G13D)
YVVSATDVM

SEQ ID NO: 98634 - protein, 9 aa, synthetic construct
  source 1..9: note = Seed: VVVGAGDVG (KRAS G13D)
YVVSATDVN

SEQ ID NO: 98635 - protein, 9 aa, synthetic construct
  source 1..9: note = Seed: VVVGAGDVG (KRAS G13D)
YVVSATDVP

SEQ ID NO: 98636 - protein, 9 aa, synthetic construct
  source 1..9: note = Seed: VVVGAGDVG (KRAS G13D)
YVVSATDVQ

SEQ ID NO: 98637 - protein, 9 aa, synthetic construct
  source 1..9: note = Seed: VVVGAGDVG (KRAS G13D)
YVVSATDVR

SEQ ID NO: 98638 - protein, 9 aa, synthetic construct
  source 1..9: note = Seed: VVVGAGDVG (KRAS G13D)
YVVSATDVS

SEQ ID NO: 98639 - protein, 9 aa, synthetic construct
  source 1..9: note = Seed: VVVGAGDVG (KRAS G13D)
YVVSATDVT

SEQ ID NO: 98640 - protein, 9 aa, synthetic construct
  source 1..9: note = Seed: VVVGAGDVG (KRAS G13D)
YVVSATDVV

SEQ ID NO: 98641 - protein, 9 aa, synthetic construct
  source 1..9: note = Seed: VVVGAGDVG (KRAS G13D)
YVVSATDVW

SEQ ID NO: 98642 - protein, 9 aa, synthetic construct
  source 1..9: note = Seed: VVVGAGDVG (KRAS G13D)
YVVSATDVY

SEQ ID NO: 98643 - protein, 9 aa, synthetic construct
  source 1..9: note = Seed: VVVGAGDVG (KRAS G13D)
YVVSAVDVA

SEQ ID NO: 98644 - protein, 9 aa, synthetic construct
  source 1..9: note = Seed: VVVGAGDVG (KRAS G13D)
YVVSAVDVD

SEQ ID NO: 98645 - protein, 9 aa, synthetic construct
  source 1..9: note = Seed: VVVGAGDVG (KRAS G13D)
YVVSAVDVE

SEQ ID NO: 98646 - protein, 9 aa, synthetic construct
  source 1..9: note = Seed: VVVGAGDVG (KRAS G13D)
YVVSAVDVF

SEQ ID NO: 98647 - protein, 9 aa, synthetic construct
  source 1..9: note = Seed: VVVGAGDVG (KRAS G13D)
YVVSAVDVG

SEQ ID NO: 98648 - protein, 9 aa, synthetic construct
  source 1..9: note = Seed: VVVGAGDVG (KRAS G13D)
YVVSAVDVH

SEQ ID NO: 98649 - protein, 9 aa, synthetic construct
  source 1..9: note = Seed: VVVGAGDVG (KRAS G13D)
YVVSAVDVI

SEQ ID NO: 98650 - protein, 9 aa, synthetic construct
  source 1..9: note = Seed: VVVGAGDVG (KRAS G13D)
YVVSAVDVK

SEQ ID NO: 98651 - protein, 9 aa, synthetic construct
  source 1..9: note = Seed: VVVGAGDVG (KRAS G13D)
YVVSAVDVL

SEQ ID NO: 98652 - protein, 9 aa, synthetic construct
  source 1..9: note = Seed: VVVGAGDVG (KRAS G13D)
YVVSAVDVM

SEQ ID NO: 98653 - protein, 9 aa, synthetic construct
  source 1..9: note = Seed: VVVGAGDVG (KRAS G13D)
YVVSAVDVN

SEQ ID NO: 98654 - protein, 9 aa, synthetic construct
  source 1..9: note = Seed: VVVGAGDVG (KRAS G13D)
YVVSAVDVP

SEQ ID NO: 98655 - protein, 9 aa, synthetic construct
  source 1..9: note = Seed: VVVGAGDVG (KRAS G13D)
YVVSAVDVQ

SEQ ID NO: 98656 - protein, 9 aa, synthetic construct
  source 1..9: note = Seed: VVVGAGDVG (KRAS G13D)
YVVSAVDVR

SEQ ID NO: 98657 - protein, 9 aa, synthetic construct
  source 1..9: note = Seed: VVVGAGDVG (KRAS G13D)
YVVSAVDVS

SEQ ID NO: 98658 - protein, 9 aa, synthetic construct
  source 1..9: note = Seed: VVVGAGDVG (KRAS G13D)
YVVSAVDVT

SEQ ID NO: 98659 - protein, 9 aa, synthetic construct
  source 1..9: note = Seed: VVVGAGDVG (KRAS G13D)
YVVSAVDVV

SEQ ID NO: 98660 - protein, 9 aa, synthetic construct
  source 1..9: note = Seed: VVVGAGDVG (KRAS G13D)
YVVSAVDVY

SEQ ID NO: 98661 - protein, 9 aa, synthetic construct
  source 1..9: note = Seed: VVVGAGDVG (KRAS G13D)
YVVSAYDVA

SEQ ID NO: 98662 - protein, 9 aa, synthetic construct
  source 1..9: note = Seed: VVVGAGDVG (KRAS G13D)
YVVTAADVA

SEQ ID NO: 98663 - protein, 9 aa, synthetic construct
  source 1..9: note = Seed: VVVGAGDVG (KRAS G13D)
YVVTAADVC

SEQ ID NO: 98664 - protein, 9 aa, synthetic construct
  source 1..9: note = Seed: VVVGAGDVG (KRAS G13D)
YVVTAADVD

SEQ ID NO: 98665 - protein, 9 aa, synthetic construct
  source 1..9: note = Seed: VVVGAGDVG (KRAS G13D)
YVVTAADVE

SEQ ID NO: 98666 - protein, 9 aa, synthetic construct
  source 1..9: note = Seed: VVVGAGDVG (KRAS G13D)
YVVTAADVF

SEQ ID NO: 98667 - protein, 9 aa, synthetic construct
  source 1..9: note = Seed: VVVGAGDVG (KRAS G13D)
YVVTAADVG

SEQ ID NO: 98668 - protein, 9 aa, synthetic construct
  source 1..9: note = Seed: VVVGAGDVG (KRAS G13D)
YVVTAADVH

SEQ ID NO: 98669 - protein, 9 aa, synthetic construct
  source 1..9: note = Seed: VVVGAGDVG (KRAS G13D)
YVVTAADVI

SEQ ID NO: 98670 - protein, 9 aa, synthetic construct
  source 1..9: note = Seed: VVVGAGDVG (KRAS G13D)
YVVTAADVK

SEQ ID NO: 98671 - protein, 9 aa, synthetic construct
  source 1..9: note = Seed: VVVGAGDVG (KRAS G13D)
YVVTAADVL

SEQ ID NO: 98672 - protein, 9 aa, synthetic construct
  source 1..9: note = Seed: VVVGAGDVG (KRAS G13D)
YVVTAADVM

SEQ ID NO: 98673 - protein, 9 aa, synthetic construct
  source 1..9: note = Seed: VVVGAGDVG (KRAS G13D)
YVVTAADVN

SEQ ID NO: 98674 - protein, 9 aa, synthetic construct
  source 1..9: note = Seed: VVVGAGDVG (KRAS G13D)
YVVTAADVP

SEQ ID NO: 98675 - protein, 9 aa, synthetic construct
  source 1..9: note = Seed: VVVGAGDVG (KRAS G13D)
YVVTAADVQ

SEQ ID NO: 98676 - protein, 9 aa, synthetic construct
  source 1..9: note = Seed: VVVGAGDVG (KRAS G13D)
YVVTAADVR

SEQ ID NO: 98677 - protein, 9 aa, synthetic construct
  source 1..9: note = Seed: VVVGAGDVG (KRAS G13D)
YVVTAADVS

SEQ ID NO: 98678 - protein, 9 aa, synthetic construct
  source 1..9: note = Seed: VVVGAGDVG (KRAS G13D)
YVVTAADVT

SEQ ID NO: 98679 - protein, 9 aa, synthetic construct
  source 1..9: note = Seed: VVVGAGDVG (KRAS G13D)
YVVTAADVV

SEQ ID NO: 98680 - protein, 9 aa, synthetic construct
  source 1..9: note = Seed: VVVGAGDVG (KRAS G13D)
YVVTAADVW

SEQ ID NO: 98681 - protein, 9 aa, synthetic construct
  source 1..9: note = Seed: VVVGAGDVG (KRAS G13D)
YVVTAADVY

SEQ ID NO: 98682 - protein, 9 aa, synthetic construct
  source 1..9: note = Seed: VVVGAGDVG (KRAS G13D)
YVVTAEDVA

SEQ ID NO: 98683 - protein, 9 aa, synthetic construct
  source 1..9: note = Seed: VVVGAGDVG (KRAS G13D)
YVVTAEDVI

SEQ ID NO: 98684 - protein, 9 aa, synthetic construct
  source 1..9: note = Seed: VVVGAGDVG (KRAS G13D)
YVVTAEDVL

SEQ ID NO: 98685 - protein, 9 aa, synthetic construct
  source 1..9: note = Seed: VVVGAGDVG (KRAS G13D)
YVVTAEDVS

SEQ ID NO: 98686 - protein, 9 aa, synthetic construct
  source 1..9: note = Seed: VVVGAGDVG (KRAS G13D)
YVVTAEDVV

SEQ ID NO: 98687 - protein, 9 aa, synthetic construct
  source 1..9: note = Seed: VVVGAGDVG (KRAS G13D)
YVVTAFDVS

SEQ ID NO: 98688 - protein, 9 aa, synthetic construct
  source 1..9: note = Seed: VVVGAGDVG (KRAS G13D)
YVVTAGDVA

SEQ ID NO: 98689 - protein, 9 aa, synthetic construct
  source 1..9: note = Seed: VVVGAGDVG (KRAS G13D)
YVVTAGDVF

SEQ ID NO: 98690 - protein, 9 aa, synthetic construct
  source 1..9: note = Seed: VVVGAGDVG (KRAS G13D)
YVVTAGDVG

SEQ ID NO: 98691 - protein, 9 aa, synthetic construct
  source 1..9: note = Seed: VVVGAGDVG (KRAS G13D)
YVVTAGDVH

SEQ ID NO: 98692 - protein, 9 aa, synthetic construct
  source 1..9: note = Seed: VVVGAGDVG (KRAS G13D)
YVVTAGDVI

SEQ ID NO: 98693 - protein, 9 aa, synthetic construct
  source 1..9: note = Seed: VVVGAGDVG (KRAS G13D)
YVVTAGDVL

SEQ ID NO: 98694 - protein, 9 aa, synthetic construct
  source 1..9: note = Seed: VVVGAGDVG (KRAS G13D)
YVVTAGDVM

SEQ ID NO: 98695 - protein, 9 aa, synthetic construct
  source 1..9: note = Seed: VVVGAGDVG (KRAS G13D)
YVVTAGDVN

SEQ ID NO: 98696 - protein, 9 aa, synthetic construct
  source 1..9: note = Seed: VVVGAGDVG (KRAS G13D)
YVVTAGDVQ

SEQ ID NO: 98697 - protein, 9 aa, synthetic construct
  source 1..9: note = Seed: VVVGAGDVG (KRAS G13D)
YVVTAGDVS

SEQ ID NO: 98698 - protein, 9 aa, synthetic construct
  source 1..9: note = Seed: VVVGAGDVG (KRAS G13D)
YVVTAGDVT

SEQ ID NO: 98699 - protein, 9 aa, synthetic construct
  source 1..9: note = Seed: VVVGAGDVG (KRAS G13D)
YVVTAGDVV

SEQ ID NO: 98700 - protein, 9 aa, synthetic construct
  source 1..9: note = Seed: VVVGAGDVG (KRAS G13D)
YVVTAGDVY

SEQ ID NO: 98701 - protein, 9 aa, synthetic construct
  source 1..9: note = Seed: VVVGAGDVG (KRAS G13D)
YVVTAHDVA

SEQ ID NO: 98702 - protein, 9 aa, synthetic construct
  source 1..9: note = Seed: VVVGAGDVG (KRAS G13D)
YVVTAHDVI

SEQ ID NO: 98703 - protein, 9 aa, synthetic construct
  source 1..9: note = Seed: VVVGAGDVG (KRAS G13D)
YVVTAHDVL

SEQ ID NO: 98704 - protein, 9 aa, synthetic construct
  source 1..9: note = Seed: VVVGAGDVG (KRAS G13D)
YVVTAHDVM

SEQ ID NO: 98705 - protein, 9 aa, synthetic construct
  source 1..9: note = Seed: VVVGAGDVG (KRAS G13D)
YVVTAHDVN

SEQ ID NO: 98706 - protein, 9 aa, synthetic construct
  source 1..9: note = Seed: VVVGAGDVG (KRAS G13D)
YVVTAHDVQ

SEQ ID NO: 98707 - protein, 9 aa, synthetic construct
  source 1..9: note = Seed: VVVGAGDVG (KRAS G13D)
YVVTAHDVS

SEQ ID NO: 98708 - protein, 9 aa, synthetic construct
  source 1..9: note = Seed: VVVGAGDVG (KRAS G13D)
YVVTAHDVT

SEQ ID NO: 98709 - protein, 9 aa, synthetic construct
  source 1..9: note = Seed: VVVGAGDVG (KRAS G13D)
YVVTAHDVV

SEQ ID NO: 98710 - protein, 9 aa, synthetic construct
  source 1..9: note = Seed: VVVGAGDVG (KRAS G13D)
YVVTAIDVA

SEQ ID NO: 98711 - protein, 9 aa, synthetic construct
  source 1..9: note = Seed: VVVGAGDVG (KRAS G13D)
YVVTAIDVE

SEQ ID NO: 98712 - protein, 9 aa, synthetic construct
  source 1..9: note = Seed: VVVGAGDVG (KRAS G13D)
YVVTAIDVG

SEQ ID NO: 98713 - protein, 9 aa, synthetic construct
  source 1..9: note = Seed: VVVGAGDVG (KRAS G13D)
YVVTAIDVH

SEQ ID NO: 98714 - protein, 9 aa, synthetic construct
  source 1..9: note = Seed: VVVGAGDVG (KRAS G13D)
YVVTAIDVI

SEQ ID NO: 98715 - protein, 9 aa, synthetic construct
  source 1..9: note = Seed: VVVGAGDVG (KRAS G13D)
YVVTAIDVL

SEQ ID NO: 98716 - protein, 9 aa, synthetic construct
  source 1..9: note = Seed: VVVGAGDVG (KRAS G13D)
YVVTAIDVM

SEQ ID NO: 98717 - protein, 9 aa, synthetic construct
  source 1..9: note = Seed: VVVGAGDVG (KRAS G13D)
YVVTAIDVN

SEQ ID NO: 98718 - protein, 9 aa, synthetic construct
  source 1..9: note = Seed: VVVGAGDVG (KRAS G13D)
YVVTAIDVQ

SEQ ID NO: 98719 - protein, 9 aa, synthetic construct
  source 1..9: note = Seed: VVVGAGDVG (KRAS G13D)
YVVTAIDVS

SEQ ID NO: 98720 - protein, 9 aa, synthetic construct
  source 1..9: note = Seed: VVVGAGDVG (KRAS G13D)
YVVTAIDVT

SEQ ID NO: 98721 - protein, 9 aa, synthetic construct
  source 1..9: note = Seed: VVVGAGDVG (KRAS G13D)
YVVTAIDVV

SEQ ID NO: 98722 - protein, 9 aa, synthetic construct
  source 1..9: note = Seed: VVVGAGDVG (KRAS G13D)
YVVTALDVC

SEQ ID NO: 98723 - protein, 9 aa, synthetic construct
  source 1..9: note = Seed: VVVGAGDVG (KRAS G13D)
YVVTALDVG

SEQ ID NO: 98724 - protein, 9 aa, synthetic construct
  source 1..9: note = Seed: VVVGAGDVG (KRAS G13D)
YVVTALDVS

SEQ ID NO: 98725 - protein, 9 aa, synthetic construct
  source 1..9: note = Seed: VVVGAGDVG (KRAS G13D)
YVVTAMDVC

SEQ ID NO: 98726 - protein, 9 aa, synthetic construct
  source 1..9: note = Seed: VVVGAGDVG (KRAS G13D)
YVVTAMDVG

SEQ ID NO: 98727 - protein, 9 aa, synthetic construct
  source 1..9: note = Seed: VVVGAGDVG (KRAS G13D)
YVVTANDVA

SEQ ID NO: 98728 - protein, 9 aa, synthetic construct
  source 1..9: note = Seed: VVVGAGDVG (KRAS G13D)
YVVTANDVC

SEQ ID NO: 98729 - protein, 9 aa, synthetic construct
  source 1..9: note = Seed: VVVGAGDVG (KRAS G13D)
YVVTANDVD

SEQ ID NO: 98730 - protein, 9 aa, synthetic construct
  source 1..9: note = Seed: VVVGAGDVG (KRAS G13D)
YVVTANDVE

SEQ ID NO: 98731 - protein, 9 aa, synthetic construct
  source 1..9: note = Seed: VVVGAGDVG (KRAS G13D)
YVVTANDVG

SEQ ID NO: 98732 - protein, 9 aa, synthetic construct
  source 1..9: note = Seed: VVVGAGDVG (KRAS G13D)
YVVTANDVH

SEQ ID NO: 98733 - protein, 9 aa, synthetic construct
  source 1..9: note = Seed: VVVGAGDVG (KRAS G13D)
YVVTANDVI

SEQ ID NO: 98734 - protein, 9 aa, synthetic construct
  source 1..9: note = Seed: VVVGAGDVG (KRAS G13D)
YVVTANDVL

SEQ ID NO: 98735 - protein, 9 aa, synthetic construct
  source 1..9: note = Seed: VVVGAGDVG (KRAS G13D)
YVVTANDVM

SEQ ID NO: 98736 - protein, 9 aa, synthetic construct
  source 1..9: note = Seed: VVVGAGDVG (KRAS G13D)
YVVTANDVN

SEQ ID NO: 98737 - protein, 9 aa, synthetic construct
  source 1..9: note = Seed: VVVGAGDVG (KRAS G13D)
YVVTANDVQ

SEQ ID NO: 98738 - protein, 9 aa, synthetic construct
  source 1..9: note = Seed: VVVGAGDVG (KRAS G13D)
YVVTANDVS

SEQ ID NO: 98739 - protein, 9 aa, synthetic construct
  source 1..9: note = Seed: VVVGAGDVG (KRAS G13D)
YVVTANDVT

SEQ ID NO: 98740 - protein, 9 aa, synthetic construct
  source 1..9: note = Seed: VVVGAGDVG (KRAS G13D)
YVVTANDVV

SEQ ID NO: 98741 - protein, 9 aa, synthetic construct
  source 1..9: note = Seed: VVVGAGDVG (KRAS G13D)
YVVTANDVY

SEQ ID NO: 98742 - protein, 9 aa, synthetic construct
  source 1..9: note = Seed: VVVGAGDVG (KRAS G13D)
YVVTAPDVA

SEQ ID NO: 98743 - protein, 9 aa, synthetic construct
  source 1..9: note = Seed: VVVGAGDVG (KRAS G13D)
YVVTAPDVE

SEQ ID NO: 98744 - protein, 9 aa, synthetic construct
  source 1..9: note = Seed: VVVGAGDVG (KRAS G13D)
YVVTAPDVF

SEQ ID NO: 98745 - protein, 9 aa, synthetic construct
  source 1..9: note = Seed: VVVGAGDVG (KRAS G13D)
YVVTAPDVG

SEQ ID NO: 98746 - protein, 9 aa, synthetic construct
  source 1..9: note = Seed: VVVGAGDVG (KRAS G13D)
YVVTAPDVH

SEQ ID NO: 98747 - protein, 9 aa, synthetic construct
  source 1..9: note = Seed: VVVGAGDVG (KRAS G13D)
YVVTAPDVI

SEQ ID NO: 98748 - protein, 9 aa, synthetic construct
  source 1..9: note = Seed: VVVGAGDVG (KRAS G13D)
YVVTAPDVK

SEQ ID NO: 98749 - protein, 9 aa, synthetic construct
  source 1..9: note = Seed: VVVGAGDVG (KRAS G13D)
YVVTAPDVL

SEQ ID NO: 98750 - protein, 9 aa, synthetic construct
  source 1..9: note = Seed: VVVGAGDVG (KRAS G13D)
YVVTAPDVM

SEQ ID NO: 98751 - protein, 9 aa, synthetic construct
  source 1..9: note = Seed: VVVGAGDVG (KRAS G13D)
YVVTAPDVN

SEQ ID NO: 98752 - protein, 9 aa, synthetic construct
  source 1..9: note = Seed: VVVGAGDVG (KRAS G13D)
YVVTAPDVP

SEQ ID NO: 98753 - protein, 9 aa, synthetic construct
  source 1..9: note = Seed: VVVGAGDVG (KRAS G13D)
YVVTAPDVQ

SEQ ID NO: 98754 - protein, 9 aa, synthetic construct
  source 1..9: note = Seed: VVVGAGDVG (KRAS G13D)
YVVTAPDVR

SEQ ID NO: 98755 - protein, 9 aa, synthetic construct
  source 1..9: note = Seed: VVVGAGDVG (KRAS G13D)
YVVTAPDVS

SEQ ID NO: 98756 - protein, 9 aa, synthetic construct
  source 1..9: note = Seed: VVVGAGDVG (KRAS G13D)
YVVTAPDVT

SEQ ID NO: 98757 - protein, 9 aa, synthetic construct
  source 1..9: note = Seed: VVVGAGDVG (KRAS G13D)
YVVTAPDVV

SEQ ID NO: 98758 - protein, 9 aa, synthetic construct
  source 1..9: note = Seed: VVVGAGDVG (KRAS G13D)
YVVTAPDVW

SEQ ID NO: 98759 - protein, 9 aa, synthetic construct
  source 1..9: note = Seed: VVVGAGDVG (KRAS G13D)
YVVTAPDVY

SEQ ID NO: 98760 - protein, 9 aa, synthetic construct
  source 1..9: note = Seed: VVVGAGDVG (KRAS G13D)
YVVTAQDVA

SEQ ID NO: 98761 - protein, 9 aa, synthetic construct
  source 1..9: note = Seed: VVVGAGDVG (KRAS G13D)
YVVTAQDVM

SEQ ID NO: 98762 - protein, 9 aa, synthetic construct
  source 1..9: note = Seed: VVVGAGDVG (KRAS G13D)
YVVTAQDVN

SEQ ID NO: 98763 - protein, 9 aa, synthetic construct
  source 1..9: note = Seed: VVVGAGDVG (KRAS G13D)
YVVTAQDVQ

SEQ ID NO: 98764 - protein, 9 aa, synthetic construct
  source 1..9: note = Seed: VVVGAGDVG (KRAS G13D)
YVVTAQDVS

SEQ ID NO: 98765 - protein, 9 aa, synthetic construct
  source 1..9: note = Seed: VVVGAGDVG (KRAS G13D)
YVVTAQDVT

SEQ ID NO: 98766 - protein, 9 aa, synthetic construct
  source 1..9: note = Seed: VVVGAGDVG (KRAS G13D)
YVVTAQDVV

SEQ ID NO: 98767 - protein, 9 aa, synthetic construct
  source 1..9: note = Seed: VVVGAGDVG (KRAS G13D)
YVVTARDVA

SEQ ID NO: 98768 - protein, 9 aa, synthetic construct
  source 1..9: note = Seed: VVVGAGDVG (KRAS G13D)
YVVTARDVS

SEQ ID NO: 98769 - protein, 9 aa, synthetic construct
  source 1..9: note = Seed: VVVGAGDVG (KRAS G13D)
YVVTASDVA

SEQ ID NO: 98770 - protein, 9 aa, synthetic construct
  source 1..9: note = Seed: VVVGAGDVG (KRAS G13D)
YVVTASDVC

SEQ ID NO: 98771 - protein, 9 aa, synthetic construct
  source 1..9: note = Seed: VVVGAGDVG (KRAS G13D)
YVVTASDVD

SEQ ID NO: 98772 - protein, 9 aa, synthetic construct
  source 1..9: note = Seed: VVVGAGDVG (KRAS G13D)
YVVTASDVE

SEQ ID NO: 98773 - protein, 9 aa, synthetic construct
  source 1..9: note = Seed: VVVGAGDVG (KRAS G13D)
YVVTASDVF

SEQ ID NO: 98774 - protein, 9 aa, synthetic construct
  source 1..9: note = Seed: VVVGAGDVG (KRAS G13D)
YVVTASDVG

SEQ ID NO: 98775 - protein, 9 aa, synthetic construct
  source 1..9: note = Seed: VVVGAGDVG (KRAS G13D)
YVVTASDVH

SEQ ID NO: 98776 - protein, 9 aa, synthetic construct
  source 1..9: note = Seed: VVVGAGDVG (KRAS G13D)
YVVTASDVI

SEQ ID NO: 98777 - protein, 9 aa, synthetic construct
  source 1..9: note = Seed: VVVGAGDVG (KRAS G13D)
YVVTASDVK

SEQ ID NO: 98778 - protein, 9 aa, synthetic construct
  source 1..9: note = Seed: VVVGAGDVG (KRAS G13D)
YVVTASDVL

SEQ ID NO: 98779 - protein, 9 aa, synthetic construct
  source 1..9: note = Seed: VVVGAGDVG (KRAS G13D)
YVVTASDVM

SEQ ID NO: 98780 - protein, 9 aa, synthetic construct
  source 1..9: note = Seed: VVVGAGDVG (KRAS G13D)
YVVTASDVN

SEQ ID NO: 98781 - protein, 9 aa, synthetic construct
  source 1..9: note = Seed: VVVGAGDVG (KRAS G13D)
YVVTASDVP

SEQ ID NO: 98782 - protein, 9 aa, synthetic construct
  source 1..9: note = Seed: VVVGAGDVG (KRAS G13D)
YVVTASDVQ

SEQ ID NO: 98783 - protein, 9 aa, synthetic construct
  source 1..9: note = Seed: VVVGAGDVG (KRAS G13D)
YVVTASDVR

SEQ ID NO: 98784 - protein, 9 aa, synthetic construct
  source 1..9: note = Seed: VVVGAGDVG (KRAS G13D)
YVVTASDVS

SEQ ID NO: 98785 - protein, 9 aa, synthetic construct
  source 1..9: note = Seed: VVVGAGDVG (KRAS G13D)
YVVTASDVT

SEQ ID NO: 98786 - protein, 9 aa, synthetic construct
  source 1..9: note = Seed: VVVGAGDVG (KRAS G13D)
YVVTASDVV

SEQ ID NO: 98787 - protein, 9 aa, synthetic construct
  source 1..9: note = Seed: VVVGAGDVG (KRAS G13D)
YVVTASDVW

SEQ ID NO: 98788 - protein, 9 aa, synthetic construct
  source 1..9: note = Seed: VVVGAGDVG (KRAS G13D)
YVVTASDVY

SEQ ID NO: 98789 - protein, 9 aa, synthetic construct
  source 1..9: note = Seed: VVVGAGDVG (KRAS G13D)
YVVTATDVA

SEQ ID NO: 98790 - protein, 9 aa, synthetic construct
  source 1..9: note = Seed: VVVGAGDVG (KRAS G13D)
YVVTATDVF

SEQ ID NO: 98791 - protein, 9 aa, synthetic construct
  source 1..9: note = Seed: VVVGAGDVG (KRAS G13D)
YVVTATDVG

SEQ ID NO: 98792 - protein, 9 aa, synthetic construct
  source 1..9: note = Seed: VVVGAGDVG (KRAS G13D)
YVVTATDVH

SEQ ID NO: 98793 - protein, 9 aa, synthetic construct
  source 1..9: note = Seed: VVVGAGDVG (KRAS G13D)
YVVTATDVI

SEQ ID NO: 98794 - protein, 9 aa, synthetic construct
  source 1..9: note = Seed: VVVGAGDVG (KRAS G13D)
YVVTATDVK

SEQ ID NO: 98795 - protein, 9 aa, synthetic construct
  source 1..9: note = Seed: VVVGAGDVG (KRAS G13D)
YVVTATDVL

SEQ ID NO: 98796 - protein, 9 aa, synthetic construct
  source 1..9: note = Seed: VVVGAGDVG (KRAS G13D)
YVVTATDVM

SEQ ID NO: 98797 - protein, 9 aa, synthetic construct
  source 1..9: note = Seed: VVVGAGDVG (KRAS G13D)
YVVTATDVN

SEQ ID NO: 98798 - protein, 9 aa, synthetic construct
  source 1..9: note = Seed: VVVGAGDVG (KRAS G13D)
YVVTATDVP

SEQ ID NO: 98799 - protein, 9 aa, synthetic construct
  source 1..9: note = Seed: VVVGAGDVG (KRAS G13D)
YVVTATDVQ

SEQ ID NO: 98800 - protein, 9 aa, synthetic construct
  source 1..9: note = Seed: VVVGAGDVG (KRAS G13D)
YVVTATDVR

SEQ ID NO: 98801 - protein, 9 aa, synthetic construct
  source 1..9: note = Seed: VVVGAGDVG (KRAS G13D)
YVVTATDVS

SEQ ID NO: 98802 - protein, 9 aa, synthetic construct
  source 1..9: note = Seed: VVVGAGDVG (KRAS G13D)
YVVTATDVT

SEQ ID NO: 98803 - protein, 9 aa, synthetic construct
  source 1..9: note = Seed: VVVGAGDVG (KRAS G13D)
YVVTATDVV

SEQ ID NO: 98804 - protein, 9 aa, synthetic construct
  source 1..9: note = Seed: VVVGAGDVG (KRAS G13D)
YVVTATDVW

SEQ ID NO: 98805 - protein, 9 aa, synthetic construct
  source 1..9: note = Seed: VVVGAGDVG (KRAS G13D)
YVVTATDVY

SEQ ID NO: 98806 - protein, 9 aa, synthetic construct
  source 1..9: note = Seed: VVVGAGDVG (KRAS G13D)
YVVTAVDVA

SEQ ID NO: 98807 - protein, 9 aa, synthetic construct
  source 1..9: note = Seed: VVVGAGDVG (KRAS G13D)
YVVTAVDVE

SEQ ID NO: 98808 - protein, 9 aa, synthetic construct
  source 1..9: note = Seed: VVVGAGDVG (KRAS G13D)
YVVTAVDVF

SEQ ID NO: 98809 - protein, 9 aa, synthetic construct
  source 1..9: note = Seed: VVVGAGDVG (KRAS G13D)
YVVTAVDVG

SEQ ID NO: 98810 - protein, 9 aa, synthetic construct
  source 1..9: note = Seed: VVVGAGDVG (KRAS G13D)
YVVTAVDVH

SEQ ID NO: 98811 - protein, 9 aa, synthetic construct
  source 1..9: note = Seed: VVVGAGDVG (KRAS G13D)
YVVTAVDVI

SEQ ID NO: 98812 - protein, 9 aa, synthetic construct
  source 1..9: note = Seed: VVVGAGDVG (KRAS G13D)
YVVTAVDVK

SEQ ID NO: 98813 - protein, 9 aa, synthetic construct
  source 1..9: note = Seed: VVVGAGDVG (KRAS G13D)
YVVTAVDVL

SEQ ID NO: 98814 - protein, 9 aa, synthetic construct
  source 1..9: note = Seed: VVVGAGDVG (KRAS G13D)
YVVTAVDVM

SEQ ID NO: 98815 - protein, 9 aa, synthetic construct
  source 1..9: note = Seed: VVVGAGDVG (KRAS G13D)
YVVTAVDVN

SEQ ID NO: 98816 - protein, 9 aa, synthetic construct
  source 1..9: note = Seed: VVVGAGDVG (KRAS G13D)
YVVTAVDVP

SEQ ID NO: 98817 - protein, 9 aa, synthetic construct
  source 1..9: note = Seed: VVVGAGDVG (KRAS G13D)
YVVTAVDVQ

SEQ ID NO: 98818 - protein, 9 aa, synthetic construct
  source 1..9: note = Seed: VVVGAGDVG (KRAS G13D)
YVVTAVDVR

SEQ ID NO: 98819 - protein, 9 aa, synthetic construct
  source 1..9: note = Seed: VVVGAGDVG (KRAS G13D)
YVVTAVDVS

SEQ ID NO: 98820 - protein, 9 aa, synthetic construct
  source 1..9: note = Seed: VVVGAGDVG (KRAS G13D)
YVVTAVDVT

SEQ ID NO: 98821 - protein, 9 aa, synthetic construct
  source 1..9: note = Seed: VVVGAGDVG (KRAS G13D)
YVVTAVDVV

SEQ ID NO: 98822 - protein, 9 aa, synthetic construct
  source 1..9: note = Seed: VVVGAGDVG (KRAS G13D)
YVVTAVDVY

SEQ ID NO: 98823 - protein, 9 aa, synthetic construct
  source 1..9: note = Seed: VVVGAGDVG (KRAS G13D)
YVVTAYDVA

SEQ ID NO: 98824 - protein, 9 aa, synthetic construct
  source 1..9: note = Seed: VVVGAGDVG (KRAS G13D)
YVVVAADVA

SEQ ID NO: 98825 - protein, 9 aa, synthetic construct
  source 1..9: note = Seed: VVVGAGDVG (KRAS G13D)
YVVVAADVC

SEQ ID NO: 98826 - protein, 9 aa, synthetic construct
  source 1..9: note = Seed: VVVGAGDVG (KRAS G13D)
YVVVAADVD

SEQ ID NO: 98827 - protein, 9 aa, synthetic construct
  source 1..9: note = Seed: VVVGAGDVG (KRAS G13D)
YVVVAADVE

SEQ ID NO: 98828 - protein, 9 aa, synthetic construct
  source 1..9: note = Seed: VVVGAGDVG (KRAS G13D)
YVVVAADVF

SEQ ID NO: 98829 - protein, 9 aa, synthetic construct
  source 1..9: note = Seed: VVVGAGDVG (KRAS G13D)
YVVVAADVG

SEQ ID NO: 98830 - protein, 9 aa, synthetic construct
  source 1..9: note = Seed: VVVGAGDVG (KRAS G13D)
YVVVAADVH

SEQ ID NO: 98831 - protein, 9 aa, synthetic construct
  source 1..9: note = Seed: VVVGAGDVG (KRAS G13D)
YVVVAADVI

SEQ ID NO: 98832 - protein, 9 aa, synthetic construct
  source 1..9: note = Seed: VVVGAGDVG (KRAS G13D)
YVVVAADVK

SEQ ID NO: 98833 - protein, 9 aa, synthetic construct
  source 1..9: note = Seed: VVVGAGDVG (KRAS G13D)
YVVVAADVL

SEQ ID NO: 98834 - protein, 9 aa, synthetic construct
  source 1..9: note = Seed: VVVGAGDVG (KRAS G13D)
YVVVAADVM

SEQ ID NO: 98835 - protein, 9 aa, synthetic construct
  source 1..9: note = Seed: VVVGAGDVG (KRAS G13D)
YVVVAADVN

SEQ ID NO: 98836 - protein, 9 aa, synthetic construct
  source 1..9: note = Seed: VVVGAGDVG (KRAS G13D)
YVVVAADVP

SEQ ID NO: 98837 - protein, 9 aa, synthetic construct
  source 1..9: note = Seed: VVVGAGDVG (KRAS G13D)
YVVVAADVQ

SEQ ID NO: 98838 - protein, 9 aa, synthetic construct
  source 1..9: note = Seed: VVVGAGDVG (KRAS G13D)
YVVVAADVR

SEQ ID NO: 98839 - protein, 9 aa, synthetic construct
  source 1..9: note = Seed: VVVGAGDVG (KRAS G13D)
YVVVAADVS

SEQ ID NO: 98840 - protein, 9 aa, synthetic construct
  source 1..9: note = Seed: VVVGAGDVG (KRAS G13D)
YVVVAADVT

SEQ ID NO: 98841 - protein, 9 aa, synthetic construct
  source 1..9: note = Seed: VVVGAGDVG (KRAS G13D)
YVVVAADVV

SEQ ID NO: 98842 - protein, 9 aa, synthetic construct
  source 1..9: note = Seed: VVVGAGDVG (KRAS G13D)
YVVVAADVY

SEQ ID NO: 98843 - protein, 9 aa, synthetic construct
  source 1..9: note = Seed: VVVGAGDVG (KRAS G13D)
YVVVADDVA

SEQ ID NO: 98844 - protein, 9 aa, synthetic construct
  source 1..9: note = Seed: VVVGAGDVG (KRAS G13D)
YVVVADDVS

SEQ ID NO: 98845 - protein, 9 aa, synthetic construct
  source 1..9: note = Seed: VVVGAGDVG (KRAS G13D)
YVVVAEDVA

SEQ ID NO: 98846 - protein, 9 aa, synthetic construct
  source 1..9: note = Seed: VVVGAGDVG (KRAS G13D)
YVVVAEDVH

SEQ ID NO: 98847 - protein, 9 aa, synthetic construct
  source 1..9: note = Seed: VVVGAGDVG (KRAS G13D)
YVVVAEDVI

SEQ ID NO: 98848 - protein, 9 aa, synthetic construct
  source 1..9: note = Seed: VVVGAGDVG (KRAS G13D)
YVVVAEDVL

SEQ ID NO: 98849 - protein, 9 aa, synthetic construct
  source 1..9: note = Seed: VVVGAGDVG (KRAS G13D)
YVVVAEDVM

SEQ ID NO: 98850 - protein, 9 aa, synthetic construct
  source 1..9: note = Seed: VVVGAGDVG (KRAS G13D)
YVVVAEDVN

SEQ ID NO: 98851 - protein, 9 aa, synthetic construct
  source 1..9: note = Seed: VVVGAGDVG (KRAS G13D)
YVVVAEDVR

SEQ ID NO: 98852 - protein, 9 aa, synthetic construct
  source 1..9: note = Seed: VVVGAGDVG (KRAS G13D)
YVVVAEDVS

SEQ ID NO: 98853 - protein, 9 aa, synthetic construct
  source 1..9: note = Seed: VVVGAGDVG (KRAS G13D)
YVVVAEDVT

SEQ ID NO: 98854 - protein, 9 aa, synthetic construct
  source 1..9: note = Seed: VVVGAGDVG (KRAS G13D)
YVVVAEDVV

SEQ ID NO: 98855 - protein, 9 aa, synthetic construct
  source 1..9: note = Seed: VVVGAGDVG (KRAS G13D)
YVVVAGDVA

SEQ ID NO: 98856 - protein, 9 aa, synthetic construct
  source 1..9: note = Seed: VVVGAGDVG (KRAS G13D)
YVVVAGDVD

SEQ ID NO: 98857 - protein, 9 aa, synthetic construct
  source 1..9: note = Seed: VVVGAGDVG (KRAS G13D)
YVVVAGDVE

SEQ ID NO: 98858 - protein, 9 aa, synthetic construct
  source 1..9: note = Seed: VVVGAGDVG (KRAS G13D)
YVVVAGDVG

SEQ ID NO: 98859 - protein, 9 aa, synthetic construct
  source 1..9: note = Seed: VVVGAGDVG (KRAS G13D)
YVVVAGDVH

SEQ ID NO: 98860 - protein, 9 aa, synthetic construct
  source 1..9: note = Seed: VVVGAGDVG (KRAS G13D)
YVVVAGDVI

SEQ ID NO: 98861 - protein, 9 aa, synthetic construct
  source 1..9: note = Seed: VVVGAGDVG (KRAS G13D)
YVVVAGDVK

SEQ ID NO: 98862 - protein, 9 aa, synthetic construct
  source 1..9: note = Seed: VVVGAGDVG (KRAS G13D)
YVVVAGDVL

SEQ ID NO: 98863 - protein, 9 aa, synthetic construct
  source 1..9: note = Seed: VVVGAGDVG (KRAS G13D)
YVVVAGDVM

SEQ ID NO: 98864 - protein, 9 aa, synthetic construct
  source 1..9: note = Seed: VVVGAGDVG (KRAS G13D)
YVVVAGDVN

SEQ ID NO: 98865 - protein, 9 aa, synthetic construct
  source 1..9: note = Seed: VVVGAGDVG (KRAS G13D)
YVVVAGDVP

SEQ ID NO: 98866 - protein, 9 aa, synthetic construct
  source 1..9: note = Seed: VVVGAGDVG (KRAS G13D)
YVVVAGDVQ

SEQ ID NO: 98867 - protein, 9 aa, synthetic construct
  source 1..9: note = Seed: VVVGAGDVG (KRAS G13D)
YVVVAGDVR

SEQ ID NO: 98868 - protein, 9 aa, synthetic construct
  source 1..9: note = Seed: VVVGAGDVG (KRAS G13D)
YVVVAGDVS

SEQ ID NO: 98869 - protein, 9 aa, synthetic construct
  source 1..9: note = Seed: VVVGAGDVG (KRAS G13D)
YVVVAGDVT

SEQ ID NO: 98870 - protein, 9 aa, synthetic construct
  source 1..9: note = Seed: VVVGAGDVG (KRAS G13D)
YVVVAGDVV

SEQ ID NO: 98871 - protein, 9 aa, synthetic construct
  source 1..9: note = Seed: VVVGAGDVG (KRAS G13D)
YVVVAGDVY

SEQ ID NO: 98872 - protein, 9 aa, synthetic construct
  source 1..9: note = Seed: VVVGAGDVG (KRAS G13D)
YVVVAHDVA

SEQ ID NO: 98873 - protein, 9 aa, synthetic construct
  source 1..9: note = Seed: VVVGAGDVG (KRAS G13D)
YVVVAHDVG

SEQ ID NO: 98874 - protein, 9 aa, synthetic construct
  source 1..9: note = Seed: VVVGAGDVG (KRAS G13D)
YVVVAHDVH

SEQ ID NO: 98875 - protein, 9 aa, synthetic construct
  source 1..9: note = Seed: VVVGAGDVG (KRAS G13D)
YVVVAHDVI

SEQ ID NO: 98876 - protein, 9 aa, synthetic construct
  source 1..9: note = Seed: VVVGAGDVG (KRAS G13D)
YVVVAHDVL

SEQ ID NO: 98877 - protein, 9 aa, synthetic construct
  source 1..9: note = Seed: VVVGAGDVG (KRAS G13D)
YVVVAHDVM

SEQ ID NO: 98878 - protein, 9 aa, synthetic construct
  source 1..9: note = Seed: VVVGAGDVG (KRAS G13D)
YVVVAHDVN

SEQ ID NO: 98879 - protein, 9 aa, synthetic construct
  source 1..9: note = Seed: VVVGAGDVG (KRAS G13D)
YVVVAHDVQ

SEQ ID NO: 98880 - protein, 9 aa, synthetic construct
  source 1..9: note = Seed: VVVGAGDVG (KRAS G13D)
YVVVAHDVS

SEQ ID NO: 98881 - protein, 9 aa, synthetic construct
  source 1..9: note = Seed: VVVGAGDVG (KRAS G13D)
YVVVAHDVT

SEQ ID NO: 98882 - protein, 9 aa, synthetic construct
  source 1..9: note = Seed: VVVGAGDVG (KRAS G13D)
YVVVAHDVV

SEQ ID NO: 98883 - protein, 9 aa, synthetic construct
  source 1..9: note = Seed: VVVGAGDVG (KRAS G13D)
YVVVAIDVA

SEQ ID NO: 98884 - protein, 9 aa, synthetic construct
  source 1..9: note = Seed: VVVGAGDVG (KRAS G13D)
YVVVAIDVD

SEQ ID NO: 98885 - protein, 9 aa, synthetic construct
  source 1..9: note = Seed: VVVGAGDVG (KRAS G13D)
YVVVAIDVE

SEQ ID NO: 98886 - protein, 9 aa, synthetic construct
  source 1..9: note = Seed: VVVGAGDVG (KRAS G13D)
YVVVAIDVG

SEQ ID NO: 98887 - protein, 9 aa, synthetic construct
  source 1..9: note = Seed: VVVGAGDVG (KRAS G13D)
YVVVAIDVH

SEQ ID NO: 98888 - protein, 9 aa, synthetic construct
  source 1..9: note = Seed: VVVGAGDVG (KRAS G13D)
YVVVAIDVK

SEQ ID NO: 98889 - protein, 9 aa, synthetic construct
  source 1..9: note = Seed: VVVGAGDVG (KRAS G13D)
YVVVAIDVM

SEQ ID NO: 98890 - protein, 9 aa, synthetic construct
  source 1..9: note = Seed: VVVGAGDVG (KRAS G13D)
YVVVAIDVN

SEQ ID NO: 98891 - protein, 9 aa, synthetic construct
  source 1..9: note = Seed: VVVGAGDVG (KRAS G13D)
YVVVAIDVQ

SEQ ID NO: 98892 - protein, 9 aa, synthetic construct
  source 1..9: note = Seed: VVVGAGDVG (KRAS G13D)
YVVVAIDVR

SEQ ID NO: 98893 - protein, 9 aa, synthetic construct
  source 1..9: note = Seed: VVVGAGDVG (KRAS G13D)
YVVVAIDVS

SEQ ID NO: 98894 - protein, 9 aa, synthetic construct
  source 1..9: note = Seed: VVVGAGDVG (KRAS G13D)
YVVVAIDVT

SEQ ID NO: 98895 - protein, 9 aa, synthetic construct
  source 1..9: note = Seed: VVVGAGDVG (KRAS G13D)
YVVVAIDVV

SEQ ID NO: 98896 - protein, 9 aa, synthetic construct
  source 1..9: note = Seed: VVVGAGDVG (KRAS G13D)
YVVVAKDVA

SEQ ID NO: 98897 - protein, 9 aa, synthetic construct
  source 1..9: note = Seed: VVVGAGDVG (KRAS G13D)
YVVVALDVG

SEQ ID NO: 98898 - protein, 9 aa, synthetic construct
  source 1..9: note = Seed: VVVGAGDVG (KRAS G13D)
YVVVAMDVG

SEQ ID NO: 98899 - protein, 9 aa, synthetic construct
  source 1..9: note = Seed: VVVGAGDVG (KRAS G13D)
YVVVANDVA

SEQ ID NO: 98900 - protein, 9 aa, synthetic construct
  source 1..9: note = Seed: VVVGAGDVG (KRAS G13D)
YVVVANDVC

SEQ ID NO: 98901 - protein, 9 aa, synthetic construct
  source 1..9: note = Seed: VVVGAGDVG (KRAS G13D)
YVVVANDVD

SEQ ID NO: 98902 - protein, 9 aa, synthetic construct
  source 1..9: note = Seed: VVVGAGDVG (KRAS G13D)
YVVVANDVE

SEQ ID NO: 98903 - protein, 9 aa, synthetic construct
  source 1..9: note = Seed: VVVGAGDVG (KRAS G13D)
YVVVANDVF

SEQ ID NO: 98904 - protein, 9 aa, synthetic construct
  source 1..9: note = Seed: VVVGAGDVG (KRAS G13D)
YVVVANDVG

SEQ ID NO: 98905 - protein, 9 aa, synthetic construct
  source 1..9: note = Seed: VVVGAGDVG (KRAS G13D)
YVVVANDVH

SEQ ID NO: 98906 - protein, 9 aa, synthetic construct
  source 1..9: note = Seed: VVVGAGDVG (KRAS G13D)
YVVVANDVI

SEQ ID NO: 98907 - protein, 9 aa, synthetic construct
  source 1..9: note = Seed: VVVGAGDVG (KRAS G13D)
YVVVANDVK

SEQ ID NO: 98908 - protein, 9 aa, synthetic construct
  source 1..9: note = Seed: VVVGAGDVG (KRAS G13D)
YVVVANDVL

SEQ ID NO: 98909 - protein, 9 aa, synthetic construct
  source 1..9: note = Seed: VVVGAGDVG (KRAS G13D)
YVVVANDVM

SEQ ID NO: 98910 - protein, 9 aa, synthetic construct
  source 1..9: note = Seed: VVVGAGDVG (KRAS G13D)
YVVVANDVN

SEQ ID NO: 98911 - protein, 9 aa, synthetic construct
  source 1..9: note = Seed: VVVGAGDVG (KRAS G13D)
YVVVANDVP

SEQ ID NO: 98912 - protein, 9 aa, synthetic construct
  source 1..9: note = Seed: VVVGAGDVG (KRAS G13D)
YVVVANDVQ

SEQ ID NO: 98913 - protein, 9 aa, synthetic construct
  source 1..9: note = Seed: VVVGAGDVG (KRAS G13D)
YVVVANDVR

SEQ ID NO: 98914 - protein, 9 aa, synthetic construct
  source 1..9: note = Seed: VVVGAGDVG (KRAS G13D)
YVVVANDVS

SEQ ID NO: 98915 - protein, 9 aa, synthetic construct
  source 1..9: note = Seed: VVVGAGDVG (KRAS G13D)
YVVVANDVT

SEQ ID NO: 98916 - protein, 9 aa, synthetic construct
  source 1..9: note = Seed: VVVGAGDVG (KRAS G13D)
YVVVANDVV

SEQ ID NO: 98917 - protein, 9 aa, synthetic construct
  source 1..9: note = Seed: VVVGAGDVG (KRAS G13D)
YVVVANDVW

SEQ ID NO: 98918 - protein, 9 aa, synthetic construct
  source 1..9: note = Seed: VVVGAGDVG (KRAS G13D)
YVVVANDVY

SEQ ID NO: 98919 - protein, 9 aa, synthetic construct
  source 1..9: note = Seed: VVVGAGDVG (KRAS G13D)
YVVVAPDVA

SEQ ID NO: 98920 - protein, 9 aa, synthetic construct
  source 1..9: note = Seed: VVVGAGDVG (KRAS G13D)
YVVVAPDVC

SEQ ID NO: 98921 - protein, 9 aa, synthetic construct
  source 1..9: note = Seed: VVVGAGDVG (KRAS G13D)
YVVVAPDVD

SEQ ID NO: 98922 - protein, 9 aa, synthetic construct
  source 1..9: note = Seed: VVVGAGDVG (KRAS G13D)
YVVVAPDVE

SEQ ID NO: 98923 - protein, 9 aa, synthetic construct
  source 1..9: note = Seed: VVVGAGDVG (KRAS G13D)
YVVVAPDVF

SEQ ID NO: 98924 - protein, 9 aa, synthetic construct
  source 1..9: note = Seed: VVVGAGDVG (KRAS G13D)
YVVVAPDVG

SEQ ID NO: 98925 - protein, 9 aa, synthetic construct
  source 1..9: note = Seed: VVVGAGDVG (KRAS G13D)
YVVVAPDVH

SEQ ID NO: 98926 - protein, 9 aa, synthetic construct
  source 1..9: note = Seed: VVVGAGDVG (KRAS G13D)
YVVVAPDVI

SEQ ID NO: 98927 - protein, 9 aa, synthetic construct
  source 1..9: note = Seed: VVVGAGDVG (KRAS G13D)
YVVVAPDVK

SEQ ID NO: 98928 - protein, 9 aa, synthetic construct
  source 1..9: note = Seed: VVVGAGDVG (KRAS G13D)
YVVVAPDVL

SEQ ID NO: 98929 - protein, 9 aa, synthetic construct
  source 1..9: note = Seed: VVVGAGDVG (KRAS G13D)
YVVVAPDVM

SEQ ID NO: 98930 - protein, 9 aa, synthetic construct
  source 1..9: note = Seed: VVVGAGDVG (KRAS G13D)
YVVVAPDVN

SEQ ID NO: 98931 - protein, 9 aa, synthetic construct
  source 1..9: note = Seed: VVVGAGDVG (KRAS G13D)
YVVVAPDVP

SEQ ID NO: 98932 - protein, 9 aa, synthetic construct
  source 1..9: note = Seed: VVVGAGDVG (KRAS G13D)
YVVVAPDVQ

SEQ ID NO: 98933 - protein, 9 aa, synthetic construct
  source 1..9: note = Seed: VVVGAGDVG (KRAS G13D)
YVVVAPDVR

SEQ ID NO: 98934 - protein, 9 aa, synthetic construct
  source 1..9: note = Seed: VVVGAGDVG (KRAS G13D)
YVVVAPDVS

SEQ ID NO: 98935 - protein, 9 aa, synthetic construct
  source 1..9: note = Seed: VVVGAGDVG (KRAS G13D)
YVVVAPDVT

SEQ ID NO: 98936 - protein, 9 aa, synthetic construct
  source 1..9: note = Seed: VVVGAGDVG (KRAS G13D)
YVVVAPDVV

SEQ ID NO: 98937 - protein, 9 aa, synthetic construct
  source 1..9: note = Seed: VVVGAGDVG (KRAS G13D)
YVVVAPDVW

SEQ ID NO: 98938 - protein, 9 aa, synthetic construct
  source 1..9: note = Seed: VVVGAGDVG (KRAS G13D)
YVVVAPDVY

SEQ ID NO: 98939 - protein, 9 aa, synthetic construct
  source 1..9: note = Seed: VVVGAGDVG (KRAS G13D)
YVVVAQDVA

SEQ ID NO: 98940 - protein, 9 aa, synthetic construct
  source 1..9: note = Seed: VVVGAGDVG (KRAS G13D)
YVVVAQDVG

SEQ ID NO: 98941 - protein, 9 aa, synthetic construct
  source 1..9: note = Seed: VVVGAGDVG (KRAS G13D)
YVVVAQDVM

SEQ ID NO: 98942 - protein, 9 aa, synthetic construct
  source 1..9: note = Seed: VVVGAGDVG (KRAS G13D)
YVVVAQDVN

SEQ ID NO: 98943 - protein, 9 aa, synthetic construct
  source 1..9: note = Seed: VVVGAGDVG (KRAS G13D)
YVVVAQDVQ

SEQ ID NO: 98944 - protein, 9 aa, synthetic construct
  source 1..9: note = Seed: VVVGAGDVG (KRAS G13D)
YVVVAQDVS

SEQ ID NO: 98945 - protein, 9 aa, synthetic construct
  source 1..9: note = Seed: VVVGAGDVG (KRAS G13D)
YVVVAQDVT

SEQ ID NO: 98946 - protein, 9 aa, synthetic construct
  source 1..9: note = Seed: VVVGAGDVG (KRAS G13D)
YVVVARDVA

SEQ ID NO: 98947 - protein, 9 aa, synthetic construct
  source 1..9: note = Seed: VVVGAGDVG (KRAS G13D)
YVVVASDVA

SEQ ID NO: 98948 - protein, 9 aa, synthetic construct
  source 1..9: note = Seed: VVVGAGDVG (KRAS G13D)
YVVVASDVC

SEQ ID NO: 98949 - protein, 9 aa, synthetic construct
  source 1..9: note = Seed: VVVGAGDVG (KRAS G13D)
YVVVASDVD

SEQ ID NO: 98950 - protein, 9 aa, synthetic construct
  source 1..9: note = Seed: VVVGAGDVG (KRAS G13D)
YVVVASDVE

SEQ ID NO: 98951 - protein, 9 aa, synthetic construct
  source 1..9: note = Seed: VVVGAGDVG (KRAS G13D)
YVVVASDVF

SEQ ID NO: 98952 - protein, 9 aa, synthetic construct
  source 1..9: note = Seed: VVVGAGDVG (KRAS G13D)
YVVVASDVG

SEQ ID NO: 98953 - protein, 9 aa, synthetic construct
  source 1..9: note = Seed: VVVGAGDVG (KRAS G13D)
YVVVASDVH

SEQ ID NO: 98954 - protein, 9 aa, synthetic construct
  source 1..9: note = Seed: VVVGAGDVG (KRAS G13D)
YVVVASDVI

SEQ ID NO: 98955 - protein, 9 aa, synthetic construct
  source 1..9: note = Seed: VVVGAGDVG (KRAS G13D)
YVVVASDVK

SEQ ID NO: 98956 - protein, 9 aa, synthetic construct
  source 1..9: note = Seed: VVVGAGDVG (KRAS G13D)
YVVVASDVL

SEQ ID NO: 98957 - protein, 9 aa, synthetic construct
  source 1..9: note = Seed: VVVGAGDVG (KRAS G13D)
YVVVASDVM

SEQ ID NO: 98958 - protein, 9 aa, synthetic construct
  source 1..9: note = Seed: VVVGAGDVG (KRAS G13D)
YVVVASDVN

SEQ ID NO: 98959 - protein, 9 aa, synthetic construct
  source 1..9: note = Seed: VVVGAGDVG (KRAS G13D)
YVVVASDVP

SEQ ID NO: 98960 - protein, 9 aa, synthetic construct
  source 1..9: note = Seed: VVVGAGDVG (KRAS G13D)
YVVVASDVQ

SEQ ID NO: 98961 - protein, 9 aa, synthetic construct
  source 1..9: note = Seed: VVVGAGDVG (KRAS G13D)
YVVVASDVR

SEQ ID NO: 98962 - protein, 9 aa, synthetic construct
  source 1..9: note = Seed: VVVGAGDVG (KRAS G13D)
YVVVASDVS

SEQ ID NO: 98963 - protein, 9 aa, synthetic construct
  source 1..9: note = Seed: VVVGAGDVG (KRAS G13D)
YVVVASDVT

SEQ ID NO: 98964 - protein, 9 aa, synthetic construct
  source 1..9: note = Seed: VVVGAGDVG (KRAS G13D)
YVVVASDVV

SEQ ID NO: 98965 - protein, 9 aa, synthetic construct
  source 1..9: note = Seed: VVVGAGDVG (KRAS G13D)
YVVVASDVW

SEQ ID NO: 98966 - protein, 9 aa, synthetic construct
  source 1..9: note = Seed: VVVGAGDVG (KRAS G13D)
YVVVASDVY

SEQ ID NO: 98967 - protein, 9 aa, synthetic construct
  source 1..9: note = Seed: VVVGAGDVG (KRAS G13D)
YVVVATDVA

SEQ ID NO: 98968 - protein, 9 aa, synthetic construct
  source 1..9: note = Seed: VVVGAGDVG (KRAS G13D)
YVVVATDVD

SEQ ID NO: 98969 - protein, 9 aa, synthetic construct
  source 1..9: note = Seed: VVVGAGDVG (KRAS G13D)
YVVVATDVE

SEQ ID NO: 98970 - protein, 9 aa, synthetic construct
  source 1..9: note = Seed: VVVGAGDVG (KRAS G13D)
YVVVATDVF

SEQ ID NO: 98971 - protein, 9 aa, synthetic construct
  source 1..9: note = Seed: VVVGAGDVG (KRAS G13D)
YVVVATDVG

SEQ ID NO: 98972 - protein, 9 aa, synthetic construct
  source 1..9: note = Seed: VVVGAGDVG (KRAS G13D)
YVVVATDVH

SEQ ID NO: 98973 - protein, 9 aa, synthetic construct
  source 1..9: note = Seed: VVVGAGDVG (KRAS G13D)
YVVVATDVI

SEQ ID NO: 98974 - protein, 9 aa, synthetic construct
  source 1..9: note = Seed: VVVGAGDVG (KRAS G13D)
YVVVATDVK

SEQ ID NO: 98975 - protein, 9 aa, synthetic construct
  source 1..9: note = Seed: VVVGAGDVG (KRAS G13D)
YVVVATDVL

SEQ ID NO: 98976 - protein, 9 aa, synthetic construct
  source 1..9: note = Seed: VVVGAGDVG (KRAS G13D)
YVVVATDVM

SEQ ID NO: 98977 - protein, 9 aa, synthetic construct
  source 1..9: note = Seed: VVVGAGDVG (KRAS G13D)
YVVVATDVN

SEQ ID NO: 98978 - protein, 9 aa, synthetic construct
  source 1..9: note = Seed: VVVGAGDVG (KRAS G13D)
YVVVATDVP

SEQ ID NO: 98979 - protein, 9 aa, synthetic construct
  source 1..9: note = Seed: VVVGAGDVG (KRAS G13D)
YVVVATDVQ

SEQ ID NO: 98980 - protein, 9 aa, synthetic construct
  source 1..9: note = Seed: VVVGAGDVG (KRAS G13D)
YVVVATDVR

SEQ ID NO: 98981 - protein, 9 aa, synthetic construct
  source 1..9: note = Seed: VVVGAGDVG (KRAS G13D)
YVVVATDVS

SEQ ID NO: 98982 - protein, 9 aa, synthetic construct
  source 1..9: note = Seed: VVVGAGDVG (KRAS G13D)
YVVVATDVT

SEQ ID NO: 98983 - protein, 9 aa, synthetic construct
  source 1..9: note = Seed: VVVGAGDVG (KRAS G13D)
YVVVATDVV

SEQ ID NO: 98984 - protein, 9 aa, synthetic construct
  source 1..9: note = Seed: VVVGAGDVG (KRAS G13D)
YVVVATDVY

SEQ ID NO: 98985 - protein, 9 aa, synthetic construct
  source 1..9: note = Seed: VVVGAGDVG (KRAS G13D)
YVVVAVDVA

SEQ ID NO: 98986 - protein, 9 aa, synthetic construct
  source 1..9: note = Seed: VVVGAGDVG (KRAS G13D)
YVVVAVDVD

SEQ ID NO: 98987 - protein, 9 aa, synthetic construct
  source 1..9: note = Seed: VVVGAGDVG (KRAS G13D)
YVVVAVDVE

SEQ ID NO: 98988 - protein, 9 aa, synthetic construct
  source 1..9: note = Seed: VVVGAGDVG (KRAS G13D)
YVVVAVDVG

SEQ ID NO: 98989 - protein, 9 aa, synthetic construct
  source 1..9: note = Seed: VVVGAGDVG (KRAS G13D)
YVVVAVDVH

SEQ ID NO: 98990 - protein, 9 aa, synthetic construct
  source 1..9: note = Seed: VVVGAGDVG (KRAS G13D)
YVVVAVDVI

SEQ ID NO: 98991 - protein, 9 aa, synthetic construct
  source 1..9: note = Seed: VVVGAGDVG (KRAS G13D)
YVVVAVDVK

SEQ ID NO: 98992 - protein, 9 aa, synthetic construct
  source 1..9: note = Seed: VVVGAGDVG (KRAS G13D)
YVVVAVDVL

SEQ ID NO: 98993 - protein, 9 aa, synthetic construct
  source 1..9: note = Seed: VVVGAGDVG (KRAS G13D)
YVVVAVDVM

SEQ ID NO: 98994 - protein, 9 aa, synthetic construct
  source 1..9: note = Seed: VVVGAGDVG (KRAS G13D)
YVVVAVDVN

SEQ ID NO: 98995 - protein, 9 aa, synthetic construct
  source 1..9: note = Seed: VVVGAGDVG (KRAS G13D)
YVVVAVDVP

SEQ ID NO: 98996 - protein, 9 aa, synthetic construct
  source 1..9: note = Seed: VVVGAGDVG (KRAS G13D)
YVVVAVDVQ

SEQ ID NO: 98997 - protein, 9 aa, synthetic construct
  source 1..9: note = Seed: VVVGAGDVG (KRAS G13D)
YVVVAVDVR

SEQ ID NO: 98998 - protein, 9 aa, synthetic construct
  source 1..9: note = Seed: VVVGAGDVG (KRAS G13D)
YVVVAVDVS

SEQ ID NO: 98999 - protein, 9 aa, synthetic construct
  source 1..9: note = Seed: VVVGAGDVG (KRAS G13D)
YVVVAVDVT

SEQ ID NO: 99000 - protein, 9 aa, synthetic construct
  source 1..9: note = Seed: VVVGAGDVG (KRAS G13D)
YVVVAVDVV

SEQ ID NO: 99001 - protein, 9 aa, synthetic construct
  source 1..9: note = Seed: VVVGAGDVG (KRAS G13D)
YVVWAADVA

SEQ ID NO: 99002 - protein, 9 aa, synthetic construct
  source 1..9: note = Seed: VVVGAGDVG (KRAS G13D)
YVVWAADVE

SEQ ID NO: 99003 - protein, 9 aa, synthetic construct
  source 1..9: note = Seed: VVVGAGDVG (KRAS G13D)
YVVWAADVF

SEQ ID NO: 99004 - protein, 9 aa, synthetic construct
  source 1..9: note = Seed: VVVGAGDVG (KRAS G13D)
YVVWAADVG

SEQ ID NO: 99005 - protein, 9 aa, synthetic construct
  source 1..9: note = Seed: VVVGAGDVG (KRAS G13D)
YVVWAADVH

SEQ ID NO: 99006 - protein, 9 aa, synthetic construct
  source 1..9: note = Seed: VVVGAGDVG (KRAS G13D)
YVVWAADVI

SEQ ID NO: 99007 - protein, 9 aa, synthetic construct
  source 1..9: note = Seed: VVVGAGDVG (KRAS G13D)
YVVWAADVK

SEQ ID NO: 99008 - protein, 9 aa, synthetic construct
  source 1..9: note = Seed: VVVGAGDVG (KRAS G13D)
YVVWAADVL

SEQ ID NO: 99009 - protein, 9 aa, synthetic construct
  source 1..9: note = Seed: VVVGAGDVG (KRAS G13D)
YVVWAADVM

SEQ ID NO: 99010 - protein, 9 aa, synthetic construct
  source 1..9: note = Seed: VVVGAGDVG (KRAS G13D)
YVVWAADVN

SEQ ID NO: 99011 - protein, 9 aa, synthetic construct
  source 1..9: note = Seed: VVVGAGDVG (KRAS G13D)
YVVWAADVP

SEQ ID NO: 99012 - protein, 9 aa, synthetic construct
  source 1..9: note = Seed: VVVGAGDVG (KRAS G13D)
YVVWAADVQ

SEQ ID NO: 99013 - protein, 9 aa, synthetic construct
  source 1..9: note = Seed: VVVGAGDVG (KRAS G13D)
YVVWAADVR

SEQ ID NO: 99014 - protein, 9 aa, synthetic construct
  source 1..9: note = Seed: VVVGAGDVG (KRAS G13D)
YVVWAADVS

SEQ ID NO: 99015 - protein, 9 aa, synthetic construct
  source 1..9: note = Seed: VVVGAGDVG (KRAS G13D)
YVVWAADVT

SEQ ID NO: 99016 - protein, 9 aa, synthetic construct
  source 1..9: note = Seed: VVVGAGDVG (KRAS G13D)
YVVWAADVV

SEQ ID NO: 99017 - protein, 9 aa, synthetic construct
  source 1..9: note = Seed: VVVGAGDVG (KRAS G13D)
YVVWAADVY

SEQ ID NO: 99018 - protein, 9 aa, synthetic construct
  source 1..9: note = Seed: VVVGAGDVG (KRAS G13D)
YVVWADDVA

SEQ ID NO: 99019 - protein, 9 aa, synthetic construct
  source 1..9: note = Seed: VVVGAGDVG (KRAS G13D)
YVVWADDVF

SEQ ID NO: 99020 - protein, 9 aa, synthetic construct
  source 1..9: note = Seed: VVVGAGDVG (KRAS G13D)
YVVWADDVI

SEQ ID NO: 99021 - protein, 9 aa, synthetic construct
  source 1..9: note = Seed: VVVGAGDVG (KRAS G13D)
YVVWADDVL

SEQ ID NO: 99022 - protein, 9 aa, synthetic construct
  source 1..9: note = Seed: VVVGAGDVG (KRAS G13D)
YVVWADDVM

SEQ ID NO: 99023 - protein, 9 aa, synthetic construct
  source 1..9: note = Seed: VVVGAGDVG (KRAS G13D)
YVVWADDVS

SEQ ID NO: 99024 - protein, 9 aa, synthetic construct
  source 1..9: note = Seed: VVVGAGDVG (KRAS G13D)
YVVWADDVV

SEQ ID NO: 99025 - protein, 9 aa, synthetic construct
  source 1..9: note = Seed: VVVGAGDVG (KRAS G13D)
YVVWADDVY

SEQ ID NO: 99026 - protein, 9 aa, synthetic construct
  source 1..9: note = Seed: VVVGAGDVG (KRAS G13D)
YVVWAGDVA

SEQ ID NO: 99027 - protein, 9 aa, synthetic construct
  source 1..9: note = Seed: VVVGAGDVG (KRAS G13D)
YVVWAHDVA

SEQ ID NO: 99028 - protein, 9 aa, synthetic construct
  source 1..9: note = Seed: VVVGAGDVG (KRAS G13D)
YVVWAHDVI

SEQ ID NO: 99029 - protein, 9 aa, synthetic construct
  source 1..9: note = Seed: VVVGAGDVG (KRAS G13D)
YVVWAHDVL

SEQ ID NO: 99030 - protein, 9 aa, synthetic construct
  source 1..9: note = Seed: VVVGAGDVG (KRAS G13D)
YVVWAHDVM

SEQ ID NO: 99031 - protein, 9 aa, synthetic construct
  source 1..9: note = Seed: VVVGAGDVG (KRAS G13D)
YVVWAHDVS

SEQ ID NO: 99032 - protein, 9 aa, synthetic construct
  source 1..9: note = Seed: VVVGAGDVG (KRAS G13D)
YVVWAHDVV

SEQ ID NO: 99033 - protein, 9 aa, synthetic construct
  source 1..9: note = Seed: VVVGAGDVG (KRAS G13D)
YVVWAIDVA

SEQ ID NO: 99034 - protein, 9 aa, synthetic construct
  source 1..9: note = Seed: VVVGAGDVG (KRAS G13D)
YVVWAIDVF

SEQ ID NO: 99035 - protein, 9 aa, synthetic construct
  source 1..9: note = Seed: VVVGAGDVG (KRAS G13D)
YVVWAIDVI

SEQ ID NO: 99036 - protein, 9 aa, synthetic construct
  source 1..9: note = Seed: VVVGAGDVG (KRAS G13D)
YVVWAIDVL

SEQ ID NO: 99037 - protein, 9 aa, synthetic construct
  source 1..9: note = Seed: VVVGAGDVG (KRAS G13D)
YVVWAIDVM

SEQ ID NO: 99038 - protein, 9 aa, synthetic construct
  source 1..9: note = Seed: VVVGAGDVG (KRAS G13D)
YVVWAIDVN

SEQ ID NO: 99039 - protein, 9 aa, synthetic construct
  source 1..9: note = Seed: VVVGAGDVG (KRAS G13D)
YVVWAIDVQ

SEQ ID NO: 99040 - protein, 9 aa, synthetic construct
  source 1..9: note = Seed: VVVGAGDVG (KRAS G13D)
YVVWAIDVS

SEQ ID NO: 99041 - protein, 9 aa, synthetic construct
  source 1..9: note = Seed: VVVGAGDVG (KRAS G13D)
YVVWAIDVT

SEQ ID NO: 99042 - protein, 9 aa, synthetic construct
  source 1..9: note = Seed: VVVGAGDVG (KRAS G13D)
YVVWAIDVV

SEQ ID NO: 99043 - protein, 9 aa, synthetic construct
  source 1..9: note = Seed: VVVGAGDVG (KRAS G13D)
YVVWAIDVY

SEQ ID NO: 99044 - protein, 9 aa, synthetic construct
  source 1..9: note = Seed: VVVGAGDVG (KRAS G13D)
YVVWALDVA

SEQ ID NO: 99045 - protein, 9 aa, synthetic construct
  source 1..9: note = Seed: VVVGAGDVG (KRAS G13D)
YVVWALDVI

SEQ ID NO: 99046 - protein, 9 aa, synthetic construct
  source 1..9: note = Seed: VVVGAGDVG (KRAS G13D)
YVVWALDVV

SEQ ID NO: 99047 - protein, 9 aa, synthetic construct
  source 1..9: note = Seed: VVVGAGDVG (KRAS G13D)
YVVWAMDVA

SEQ ID NO: 99048 - protein, 9 aa, synthetic construct
  source 1..9: note = Seed: VVVGAGDVG (KRAS G13D)
YVVWAMDVF

SEQ ID NO: 99049 - protein, 9 aa, synthetic construct
  source 1..9: note = Seed: VVVGAGDVG (KRAS G13D)
YVVWAMDVI

SEQ ID NO: 99050 - protein, 9 aa, synthetic construct
  source 1..9: note = Seed: VVVGAGDVG (KRAS G13D)
YVVWAMDVL

SEQ ID NO: 99051 - protein, 9 aa, synthetic construct
  source 1..9: note = Seed: VVVGAGDVG (KRAS G13D)
YVVWAMDVM

SEQ ID NO: 99052 - protein, 9 aa, synthetic construct
  source 1..9: note = Seed: VVVGAGDVG (KRAS G13D)
YVVWAMDVR

SEQ ID NO: 99053 - protein, 9 aa, synthetic construct
  source 1..9: note = Seed: VVVGAGDVG (KRAS G13D)
YVVWAMDVS

SEQ ID NO: 99054 - protein, 9 aa, synthetic construct
  source 1..9: note = Seed: VVVGAGDVG (KRAS G13D)
YVVWAMDVV

SEQ ID NO: 99055 - protein, 9 aa, synthetic construct
  source 1..9: note = Seed: VVVGAGDVG (KRAS G13D)
YVVWAMDVY

SEQ ID NO: 99056 - protein, 9 aa, synthetic construct
  source 1..9: note = Seed: VVVGAGDVG (KRAS G13D)
YVVWANDVA

SEQ ID NO: 99057 - protein, 9 aa, synthetic construct
  source 1..9: note = Seed: VVVGAGDVG (KRAS G13D)
YVVWANDVC

SEQ ID NO: 99058 - protein, 9 aa, synthetic construct
  source 1..9: note = Seed: VVVGAGDVG (KRAS G13D)
YVVWANDVD

SEQ ID NO: 99059 - protein, 9 aa, synthetic construct
  source 1..9: note = Seed: VVVGAGDVG (KRAS G13D)
YVVWANDVE

SEQ ID NO: 99060 - protein, 9 aa, synthetic construct
  source 1..9: note = Seed: VVVGAGDVG (KRAS G13D)
YVVWANDVF

SEQ ID NO: 99061 - protein, 9 aa, synthetic construct
  source 1..9: note = Seed: VVVGAGDVG (KRAS G13D)
YVVWANDVG

SEQ ID NO: 99062 - protein, 9 aa, synthetic construct
  source 1..9: note = Seed: VVVGAGDVG (KRAS G13D)
YVVWANDVH

SEQ ID NO: 99063 - protein, 9 aa, synthetic construct
  source 1..9: note = Seed: VVVGAGDVG (KRAS G13D)
YVVWANDVI

SEQ ID NO: 99064 - protein, 9 aa, synthetic construct
  source 1..9: note = Seed: VVVGAGDVG (KRAS G13D)
YVVWANDVK

SEQ ID NO: 99065 - protein, 9 aa, synthetic construct
  source 1..9: note = Seed: VVVGAGDVG (KRAS G13D)
YVVWANDVL

SEQ ID NO: 99066 - protein, 9 aa, synthetic construct
  source 1..9: note = Seed: VVVGAGDVG (KRAS G13D)
YVVWANDVM

SEQ ID NO: 99067 - protein, 9 aa, synthetic construct
  source 1..9: note = Seed: VVVGAGDVG (KRAS G13D)
YVVWANDVN

SEQ ID NO: 99068 - protein, 9 aa, synthetic construct
  source 1..9: note = Seed: VVVGAGDVG (KRAS G13D)
YVVWANDVP

SEQ ID NO: 99069 - protein, 9 aa, synthetic construct
  source 1..9: note = Seed: VVVGAGDVG (KRAS G13D)
YVVWANDVQ

SEQ ID NO: 99070 - protein, 9 aa, synthetic construct
  source 1..9: note = Seed: VVVGAGDVG (KRAS G13D)
YVVWANDVR

SEQ ID NO: 99071 - protein, 9 aa, synthetic construct
  source 1..9: note = Seed: VVVGAGDVG (KRAS G13D)
YVVWANDVS

SEQ ID NO: 99072 - protein, 9 aa, synthetic construct
  source 1..9: note = Seed: VVVGAGDVG (KRAS G13D)
YVVWANDVT

SEQ ID NO: 99073 - protein, 9 aa, synthetic construct
  source 1..9: note = Seed: VVVGAGDVG (KRAS G13D)
YVVWANDVV

SEQ ID NO: 99074 - protein, 9 aa, synthetic construct
  source 1..9: note = Seed: VVVGAGDVG (KRAS G13D)
YVVWANDVW

SEQ ID NO: 99075 - protein, 9 aa, synthetic construct
  source 1..9: note = Seed: VVVGAGDVG (KRAS G13D)
YVVWANDVY

SEQ ID NO: 99076 - protein, 9 aa, synthetic construct
  source 1..9: note = Seed: VVVGAGDVG (KRAS G13D)
YVVWAPDVA

SEQ ID NO: 99077 - protein, 9 aa, synthetic construct
  source 1..9: note = Seed: VVVGAGDVG (KRAS G13D)
YVVWAPDVF

SEQ ID NO: 99078 - protein, 9 aa, synthetic construct
  source 1..9: note = Seed: VVVGAGDVG (KRAS G13D)
YVVWAPDVH

SEQ ID NO: 99079 - protein, 9 aa, synthetic construct
  source 1..9: note = Seed: VVVGAGDVG (KRAS G13D)
YVVWAPDVI

SEQ ID NO: 99080 - protein, 9 aa, synthetic construct
  source 1..9: note = Seed: VVVGAGDVG (KRAS G13D)
YVVWAPDVL

SEQ ID NO: 99081 - protein, 9 aa, synthetic construct
  source 1..9: note = Seed: VVVGAGDVG (KRAS G13D)
YVVWAPDVM

SEQ ID NO: 99082 - protein, 9 aa, synthetic construct
  source 1..9: note = Seed: VVVGAGDVG (KRAS G13D)
YVVWAPDVN

SEQ ID NO: 99083 - protein, 9 aa, synthetic construct
  source 1..9: note = Seed: VVVGAGDVG (KRAS G13D)
YVVWAPDVS

SEQ ID NO: 99084 - protein, 9 aa, synthetic construct
  source 1..9: note = Seed: VVVGAGDVG (KRAS G13D)
YVVWAPDVT

SEQ ID NO: 99085 - protein, 9 aa, synthetic construct
  source 1..9: note = Seed: VVVGAGDVG (KRAS G13D)
YVVWAPDVV

SEQ ID NO: 99086 - protein, 9 aa, synthetic construct
  source 1..9: note = Seed: VVVGAGDVG (KRAS G13D)
YVVWAPDVW

SEQ ID NO: 99087 - protein, 9 aa, synthetic construct
  source 1..9: note = Seed: VVVGAGDVG (KRAS G13D)
YVVWAPDVY

SEQ ID NO: 99088 - protein, 9 aa, synthetic construct
  source 1..9: note = Seed: VVVGAGDVG (KRAS G13D)
YVVWAQDVA

SEQ ID NO: 99089 - protein, 9 aa, synthetic construct
  source 1..9: note = Seed: VVVGAGDVG (KRAS G13D)
YVVWAQDVF

SEQ ID NO: 99090 - protein, 9 aa, synthetic construct
  source 1..9: note = Seed: VVVGAGDVG (KRAS G13D)
YVVWAQDVI

SEQ ID NO: 99091 - protein, 9 aa, synthetic construct
  source 1..9: note = Seed: VVVGAGDVG (KRAS G13D)
YVVWAQDVL

SEQ ID NO: 99092 - protein, 9 aa, synthetic construct
  source 1..9: note = Seed: VVVGAGDVG (KRAS G13D)
YVVWAQDVM

SEQ ID NO: 99093 - protein, 9 aa, synthetic construct
  source 1..9: note = Seed: VVVGAGDVG (KRAS G13D)
YVVWAQDVV

SEQ ID NO: 99094 - protein, 9 aa, synthetic construct
  source 1..9: note = Seed: VVVGAGDVG (KRAS G13D)
YVVWAQDVY

SEQ ID NO: 99095 - protein, 9 aa, synthetic construct
  source 1..9: note = Seed: VVVGAGDVG (KRAS G13D)
YVVWASDVA

SEQ ID NO: 99096 - protein, 9 aa, synthetic construct
  source 1..9: note = Seed: VVVGAGDVG (KRAS G13D)
YVVWASDVF

SEQ ID NO: 99097 - protein, 9 aa, synthetic construct
  source 1..9: note = Seed: VVVGAGDVG (KRAS G13D)
YVVWASDVG

SEQ ID NO: 99098 - protein, 9 aa, synthetic construct
  source 1..9: note = Seed: VVVGAGDVG (KRAS G13D)
YVVWASDVH

SEQ ID NO: 99099 - protein, 9 aa, synthetic construct
  source 1..9: note = Seed: VVVGAGDVG (KRAS G13D)
YVVWASDVI

SEQ ID NO: 99100 - protein, 9 aa, synthetic construct
  source 1..9: note = Seed: VVVGAGDVG (KRAS G13D)
YVVWASDVL

SEQ ID NO: 99101 - protein, 9 aa, synthetic construct
  source 1..9: note = Seed: VVVGAGDVG (KRAS G13D)
YVVWASDVM

SEQ ID NO: 99102 - protein, 9 aa, synthetic construct
  source 1..9: note = Seed: VVVGAGDVG (KRAS G13D)
YVVWASDVN

SEQ ID NO: 99103 - protein, 9 aa, synthetic construct
  source 1..9: note = Seed: VVVGAGDVG (KRAS G13D)
YVVWASDVQ

SEQ ID NO: 99104 - protein, 9 aa, synthetic construct
  source 1..9: note = Seed: VVVGAGDVG (KRAS G13D)
YVVWASDVR

SEQ ID NO: 99105 - protein, 9 aa, synthetic construct
  source 1..9: note = Seed: VVVGAGDVG (KRAS G13D)
YVVWASDVS

SEQ ID NO: 99106 - protein, 9 aa, synthetic construct
  source 1..9: note = Seed: VVVGAGDVG (KRAS G13D)
YVVWASDVT

SEQ ID NO: 99107 - protein, 9 aa, synthetic construct
  source 1..9: note = Seed: VVVGAGDVG (KRAS G13D)
YVVWASDVV

SEQ ID NO: 99108 - protein, 9 aa, synthetic construct
  source 1..9: note = Seed: VVVGAGDVG (KRAS G13D)
YVVWASDVY

SEQ ID NO: 99109 - protein, 9 aa, synthetic construct
  source 1..9: note = Seed: VVVGAGDVG (KRAS G13D)
YVVWATDVA

SEQ ID NO: 99110 - protein, 9 aa, synthetic construct
  source 1..9: note = Seed: VVVGAGDVG (KRAS G13D)
YVVWATDVF

SEQ ID NO: 99111 - protein, 9 aa, synthetic construct
  source 1..9: note = Seed: VVVGAGDVG (KRAS G13D)
YVVWATDVH

SEQ ID NO: 99112 - protein, 9 aa, synthetic construct
  source 1..9: note = Seed: VVVGAGDVG (KRAS G13D)
YVVWATDVI

SEQ ID NO: 99113 - protein, 9 aa, synthetic construct
  source 1..9: note = Seed: VVVGAGDVG (KRAS G13D)
YVVWATDVL

SEQ ID NO: 99114 - protein, 9 aa, synthetic construct
  source 1..9: note = Seed: VVVGAGDVG (KRAS G13D)
YVVWATDVM

SEQ ID NO: 99115 - protein, 9 aa, synthetic construct
  source 1..9: note = Seed: VVVGAGDVG (KRAS G13D)
YVVWATDVN

SEQ ID NO: 99116 - protein, 9 aa, synthetic construct
  source 1..9: note = Seed: VVVGAGDVG (KRAS G13D)
YVVWATDVS

SEQ ID NO: 99117 - protein, 9 aa, synthetic construct
  source 1..9: note = Seed: VVVGAGDVG (KRAS G13D)
YVVWATDVT

SEQ ID NO: 99118 - protein, 9 aa, synthetic construct
  source 1..9: note = Seed: VVVGAGDVG (KRAS G13D)
YVVWATDVV

SEQ ID NO: 99119 - protein, 9 aa, synthetic construct
  source 1..9: note = Seed: VVVGAGDVG (KRAS G13D)
YVVWATDVY

SEQ ID NO: 99120 - protein, 9 aa, synthetic construct
  source 1..9: note = Seed: VVVGAGDVG (KRAS G13D)
YVVWAVDVA

SEQ ID NO: 99121 - protein, 9 aa, synthetic construct
  source 1..9: note = Seed: VVVGAGDVG (KRAS G13D)
YVVWAVDVF

SEQ ID NO: 99122 - protein, 9 aa, synthetic construct
  source 1..9: note = Seed: VVVGAGDVG (KRAS G13D)
YVVWAVDVH

SEQ ID NO: 99123 - protein, 9 aa, synthetic construct
  source 1..9: note = Seed: VVVGAGDVG (KRAS G13D)
YVVWAVDVI

SEQ ID NO: 99124 - protein, 9 aa, synthetic construct
  source 1..9: note = Seed: VVVGAGDVG (KRAS G13D)
YVVWAVDVL

SEQ ID NO: 99125 - protein, 9 aa, synthetic construct
  source 1..9: note = Seed: VVVGAGDVG (KRAS G13D)
YVVWAVDVM

SEQ ID NO: 99126 - protein, 9 aa, synthetic construct
  source 1..9: note = Seed: VVVGAGDVG (KRAS G13D)
YVVWAVDVN

SEQ ID NO: 99127 - protein, 9 aa, synthetic construct
  source 1..9: note = Seed: VVVGAGDVG (KRAS G13D)
YVVWAVDVQ

SEQ ID NO: 99128 - protein, 9 aa, synthetic construct
  source 1..9: note = Seed: VVVGAGDVG (KRAS G13D)
YVVWAVDVR

SEQ ID NO: 99129 - protein, 9 aa, synthetic construct
  source 1..9: note = Seed: VVVGAGDVG (KRAS G13D)
YVVWAVDVS

SEQ ID NO: 99130 - protein, 9 aa, synthetic construct
  source 1..9: note = Seed: VVVGAGDVG (KRAS G13D)
YVVWAVDVT

SEQ ID NO: 99131 - protein, 9 aa, synthetic construct
  source 1..9: note = Seed: VVVGAGDVG (KRAS G13D)
YVVWAVDVV

SEQ ID NO: 99132 - protein, 9 aa, synthetic construct
  source 1..9: note = Seed: VVVGAGDVG (KRAS G13D)
YVVWAVDVY

SEQ ID NO: 99133 - protein, 9 aa, synthetic construct
  source 1..9: note = Seed: VVVGAGDVG (KRAS G13D)
YVVYAADVA

SEQ ID NO: 99134 - protein, 9 aa, synthetic construct
  source 1..9: note = Seed: VVVGAGDVG (KRAS G13D)
YVVYAADVC

SEQ ID NO: 99135 - protein, 9 aa, synthetic construct
  source 1..9: note = Seed: VVVGAGDVG (KRAS G13D)
YVVYAADVD

SEQ ID NO: 99136 - protein, 9 aa, synthetic construct
  source 1..9: note = Seed: VVVGAGDVG (KRAS G13D)
YVVYAADVE

SEQ ID NO: 99137 - protein, 9 aa, synthetic construct
  source 1..9: note = Seed: VVVGAGDVG (KRAS G13D)
YVVYAADVF

SEQ ID NO: 99138 - protein, 9 aa, synthetic construct
  source 1..9: note = Seed: VVVGAGDVG (KRAS G13D)
YVVYAADVG

SEQ ID NO: 99139 - protein, 9 aa, synthetic construct
  source 1..9: note = Seed: VVVGAGDVG (KRAS G13D)
YVVYAADVH

SEQ ID NO: 99140 - protein, 9 aa, synthetic construct
  source 1..9: note = Seed: VVVGAGDVG (KRAS G13D)
YVVYAADVI

SEQ ID NO: 99141 - protein, 9 aa, synthetic construct
  source 1..9: note = Seed: VVVGAGDVG (KRAS G13D)
YVVYAADVK

SEQ ID NO: 99142 - protein, 9 aa, synthetic construct
  source 1..9: note = Seed: VVVGAGDVG (KRAS G13D)
YVVYAADVL

SEQ ID NO: 99143 - protein, 9 aa, synthetic construct
  source 1..9: note = Seed: VVVGAGDVG (KRAS G13D)
YVVYAADVM

SEQ ID NO: 99144 - protein, 9 aa, synthetic construct
  source 1..9: note = Seed: VVVGAGDVG (KRAS G13D)
YVVYAADVN

SEQ ID NO: 99145 - protein, 9 aa, synthetic construct
  source 1..9: note = Seed: VVVGAGDVG (KRAS G13D)
YVVYAADVQ

SEQ ID NO: 99146 - protein, 9 aa, synthetic construct
  source 1..9: note = Seed: VVVGAGDVG (KRAS G13D)
YVVYAADVR

SEQ ID NO: 99147 - protein, 9 aa, synthetic construct
  source 1..9: note = Seed: VVVGAGDVG (KRAS G13D)
YVVYAADVS

SEQ ID NO: 99148 - protein, 9 aa, synthetic construct
  source 1..9: note = Seed: VVVGAGDVG (KRAS G13D)
YVVYAADVT

SEQ ID NO: 99149 - protein, 9 aa, synthetic construct
  source 1..9: note = Seed: VVVGAGDVG (KRAS G13D)
YVVYAADVV

SEQ ID NO: 99150 - protein, 9 aa, synthetic construct
  source 1..9: note = Seed: VVVGAGDVG (KRAS G13D)
YVVYAADVY

SEQ ID NO: 99151 - protein, 9 aa, synthetic construct
  source 1..9: note = Seed: VVVGAGDVG (KRAS G13D)
YVVYADDVA

SEQ ID NO: 99152 - protein, 9 aa, synthetic construct
  source 1..9: note = Seed: VVVGAGDVG (KRAS G13D)
YVVYADDVF

SEQ ID NO: 99153 - protein, 9 aa, synthetic construct
  source 1..9: note = Seed: VVVGAGDVG (KRAS G13D)
YVVYADDVI

SEQ ID NO: 99154 - protein, 9 aa, synthetic construct
  source 1..9: note = Seed: VVVGAGDVG (KRAS G13D)
YVVYADDVL

SEQ ID NO: 99155 - protein, 9 aa, synthetic construct
  source 1..9: note = Seed: VVVGAGDVG (KRAS G13D)
YVVYADDVM

SEQ ID NO: 99156 - protein, 9 aa, synthetic construct
  source 1..9: note = Seed: VVVGAGDVG (KRAS G13D)
YVVYADDVS

SEQ ID NO: 99157 - protein, 9 aa, synthetic construct
  source 1..9: note = Seed: VVVGAGDVG (KRAS G13D)
YVVYADDVV

SEQ ID NO: 99158 - protein, 9 aa, synthetic construct
  source 1..9: note = Seed: VVVGAGDVG (KRAS G13D)
YVVYADDVY

SEQ ID NO: 99159 - protein, 9 aa, synthetic construct
  source 1..9: note = Seed: VVVGAGDVG (KRAS G13D)
YVVYAGDVA

SEQ ID NO: 99160 - protein, 9 aa, synthetic construct
  source 1..9: note = Seed: VVVGAGDVG (KRAS G13D)
YVVYAHDVA

SEQ ID NO: 99161 - protein, 9 aa, synthetic construct
  source 1..9: note = Seed: VVVGAGDVG (KRAS G13D)
YVVYAIDVA

SEQ ID NO: 99162 - protein, 9 aa, synthetic construct
  source 1..9: note = Seed: VVVGAGDVG (KRAS G13D)
YVVYAIDVF

SEQ ID NO: 99163 - protein, 9 aa, synthetic construct
  source 1..9: note = Seed: VVVGAGDVG (KRAS G13D)
YVVYAIDVG

SEQ ID NO: 99164 - protein, 9 aa, synthetic construct
  source 1..9: note = Seed: VVVGAGDVG (KRAS G13D)
YVVYAIDVI

SEQ ID NO: 99165 - protein, 9 aa, synthetic construct
  source 1..9: note = Seed: VVVGAGDVG (KRAS G13D)
YVVYAIDVL

SEQ ID NO: 99166 - protein, 9 aa, synthetic construct
  source 1..9: note = Seed: VVVGAGDVG (KRAS G13D)
YVVYAIDVM

SEQ ID NO: 99167 - protein, 9 aa, synthetic construct
  source 1..9: note = Seed: VVVGAGDVG (KRAS G13D)
YVVYAIDVQ

SEQ ID NO: 99168 - protein, 9 aa, synthetic construct
  source 1..9: note = Seed: VVVGAGDVG (KRAS G13D)
YVVYAIDVV

SEQ ID NO: 99169 - protein, 9 aa, synthetic construct
  source 1..9: note = Seed: VVVGAGDVG (KRAS G13D)
YVVYAIDVY

SEQ ID NO: 99170 - protein, 9 aa, synthetic construct
  source 1..9: note = Seed: VVVGAGDVG (KRAS G13D)
YVVYALDVA

SEQ ID NO: 99171 - protein, 9 aa, synthetic construct
  source 1..9: note = Seed: VVVGAGDVG (KRAS G13D)
YVVYALDVQ

SEQ ID NO: 99172 - protein, 9 aa, synthetic construct
  source 1..9: note = Seed: VVVGAGDVG (KRAS G13D)
YVVYAMDVA

SEQ ID NO: 99173 - protein, 9 aa, synthetic construct
  source 1..9: note = Seed: VVVGAGDVG (KRAS G13D)
YVVYAMDVI

SEQ ID NO: 99174 - protein, 9 aa, synthetic construct
  source 1..9: note = Seed: VVVGAGDVG (KRAS G13D)
YVVYAMDVL

SEQ ID NO: 99175 - protein, 9 aa, synthetic construct
  source 1..9: note = Seed: VVVGAGDVG (KRAS G13D)
YVVYAMDVM

SEQ ID NO: 99176 - protein, 9 aa, synthetic construct
  source 1..9: note = Seed: VVVGAGDVG (KRAS G13D)
YVVYAMDVV

SEQ ID NO: 99177 - protein, 9 aa, synthetic construct
  source 1..9: note = Seed: VVVGAGDVG (KRAS G13D)
YVVYANDVA

SEQ ID NO: 99178 - protein, 9 aa, synthetic construct
  source 1..9: note = Seed: VVVGAGDVG (KRAS G13D)
YVVYANDVE

SEQ ID NO: 99179 - protein, 9 aa, synthetic construct
  source 1..9: note = Seed: VVVGAGDVG (KRAS G13D)
YVVYANDVF

SEQ ID NO: 99180 - protein, 9 aa, synthetic construct
  source 1..9: note = Seed: VVVGAGDVG (KRAS G13D)
YVVYANDVG

SEQ ID NO: 99181 - protein, 9 aa, synthetic construct
  source 1..9: note = Seed: VVVGAGDVG (KRAS G13D)
YVVYANDVH

SEQ ID NO: 99182 - protein, 9 aa, synthetic construct
  source 1..9: note = Seed: VVVGAGDVG (KRAS G13D)
YVVYANDVI

SEQ ID NO: 99183 - protein, 9 aa, synthetic construct
  source 1..9: note = Seed: VVVGAGDVG (KRAS G13D)
YVVYANDVL

SEQ ID NO: 99184 - protein, 9 aa, synthetic construct
  source 1..9: note = Seed: VVVGAGDVG (KRAS G13D)
YVVYANDVM

SEQ ID NO: 99185 - protein, 9 aa, synthetic construct
  source 1..9: note = Seed: VVVGAGDVG (KRAS G13D)
YVVYANDVN

SEQ ID NO: 99186 - protein, 9 aa, synthetic construct
  source 1..9: note = Seed: VVVGAGDVG (KRAS G13D)
YVVYANDVQ

SEQ ID NO: 99187 - protein, 9 aa, synthetic construct
  source 1..9: note = Seed: VVVGAGDVG (KRAS G13D)
YVVYANDVR

SEQ ID NO: 99188 - protein, 9 aa, synthetic construct
  source 1..9: note = Seed: VVVGAGDVG (KRAS G13D)
YVVYANDVS

SEQ ID NO: 99189 - protein, 9 aa, synthetic construct
  source 1..9: note = Seed: VVVGAGDVG (KRAS G13D)
YVVYANDVT

SEQ ID NO: 99190 - protein, 9 aa, synthetic construct
  source 1..9: note = Seed: VVVGAGDVG (KRAS G13D)
YVVYANDVV

SEQ ID NO: 99191 - protein, 9 aa, synthetic construct
  source 1..9: note = Seed: VVVGAGDVG (KRAS G13D)
YVVYANDVY

SEQ ID NO: 99192 - protein, 9 aa, synthetic construct
  source 1..9: note = Seed: VVVGAGDVG (KRAS G13D)
YVVYAPDVA

SEQ ID NO: 99193 - protein, 9 aa, synthetic construct
  source 1..9: note = Seed: VVVGAGDVG (KRAS G13D)
YVVYAPDVF

SEQ ID NO: 99194 - protein, 9 aa, synthetic construct
  source 1..9: note = Seed: VVVGAGDVG (KRAS G13D)
YVVYAPDVH

SEQ ID NO: 99195 - protein, 9 aa, synthetic construct
  source 1..9: note = Seed: VVVGAGDVG (KRAS G13D)
YVVYAPDVI

SEQ ID NO: 99196 - protein, 9 aa, synthetic construct
  source 1..9: note = Seed: VVVGAGDVG (KRAS G13D)
YVVYAPDVL

SEQ ID NO: 99197 - protein, 9 aa, synthetic construct
  source 1..9: note = Seed: VVVGAGDVG (KRAS G13D)
YVVYAPDVM

SEQ ID NO: 99198 - protein, 9 aa, synthetic construct
  source 1..9: note = Seed: VVVGAGDVG (KRAS G13D)
YVVYAPDVN

SEQ ID NO: 99199 - protein, 9 aa, synthetic construct
  source 1..9: note = Seed: VVVGAGDVG (KRAS G13D)
YVVYAPDVS

SEQ ID NO: 99200 - protein, 9 aa, synthetic construct
  source 1..9: note = Seed: VVVGAGDVG (KRAS G13D)
YVVYAPDVT

SEQ ID NO: 99201 - protein, 9 aa, synthetic construct
  source 1..9: note = Seed: VVVGAGDVG (KRAS G13D)
YVVYAPDVV

SEQ ID NO: 99202 - protein, 9 aa, synthetic construct
  source 1..9: note = Seed: VVVGAGDVG (KRAS G13D)
YVVYAPDVY

SEQ ID NO: 99203 - protein, 9 aa, synthetic construct
  source 1..9: note = Seed: VVVGAGDVG (KRAS G13D)
YVVYAQDVA

SEQ ID NO: 99204 - protein, 9 aa, synthetic construct
  source 1..9: note = Seed: VVVGAGDVG (KRAS G13D)
YVVYAQDVI

SEQ ID NO: 99205 - protein, 9 aa, synthetic construct
  source 1..9: note = Seed: VVVGAGDVG (KRAS G13D)
YVVYAQDVL

SEQ ID NO: 99206 - protein, 9 aa, synthetic construct
  source 1..9: note = Seed: VVVGAGDVG (KRAS G13D)
YVVYAQDVM

SEQ ID NO: 99207 - protein, 9 aa, synthetic construct
  source 1..9: note = Seed: VVVGAGDVG (KRAS G13D)
YVVYAQDVV

SEQ ID NO: 99208 - protein, 9 aa, synthetic construct
  source 1..9: note = Seed: VVVGAGDVG (KRAS G13D)
YVVYAQDVY

SEQ ID NO: 99209 - protein, 9 aa, synthetic construct
  source 1..9: note = Seed: VVVGAGDVG (KRAS G13D)
YVVYARDVA

SEQ ID NO: 99210 - protein, 9 aa, synthetic construct
  source 1..9: note = Seed: VVVGAGDVG (KRAS G13D)
YVVYASDVA

SEQ ID NO: 99211 - protein, 9 aa, synthetic construct
  source 1..9: note = Seed: VVVGAGDVG (KRAS G13D)
YVVYASDVE

SEQ ID NO: 99212 - protein, 9 aa, synthetic construct
  source 1..9: note = Seed: VVVGAGDVG (KRAS G13D)
YVVYASDVF

SEQ ID NO: 99213 - protein, 9 aa, synthetic construct
  source 1..9: note = Seed: VVVGAGDVG (KRAS G13D)
YVVYASDVG

SEQ ID NO: 99214 - protein, 9 aa, synthetic construct
  source 1..9: note = Seed: VVVGAGDVG (KRAS G13D)
YVVYASDVH

SEQ ID NO: 99215 - protein, 9 aa, synthetic construct
  source 1..9: note = Seed: VVVGAGDVG (KRAS G13D)
YVVYASDVI

SEQ ID NO: 99216 - protein, 9 aa, synthetic construct
  source 1..9: note = Seed: VVVGAGDVG (KRAS G13D)
YVVYASDVL

SEQ ID NO: 99217 - protein, 9 aa, synthetic construct
  source 1..9: note = Seed: VVVGAGDVG (KRAS G13D)
YVVYASDVM

SEQ ID NO: 99218 - protein, 9 aa, synthetic construct
  source 1..9: note = Seed: VVVGAGDVG (KRAS G13D)
YVVYASDVN

SEQ ID NO: 99219 - protein, 9 aa, synthetic construct
  source 1..9: note = Seed: VVVGAGDVG (KRAS G13D)
YVVYASDVQ

SEQ ID NO: 99220 - protein, 9 aa, synthetic construct
  source 1..9: note = Seed: VVVGAGDVG (KRAS G13D)
YVVYASDVS

SEQ ID NO: 99221 - protein, 9 aa, synthetic construct
  source 1..9: note = Seed: VVVGAGDVG (KRAS G13D)
YVVYASDVT

SEQ ID NO: 99222 - protein, 9 aa, synthetic construct
  source 1..9: note = Seed: VVVGAGDVG (KRAS G13D)
YVVYASDVV

SEQ ID NO: 99223 - protein, 9 aa, synthetic construct
  source 1..9: note = Seed: VVVGAGDVG (KRAS G13D)
YVVYASDVY

SEQ ID NO: 99224 - protein, 9 aa, synthetic construct
  source 1..9: note = Seed: VVVGAGDVG (KRAS G13D)
YVVYATDVA

SEQ ID NO: 99225 - protein, 9 aa, synthetic construct
  source 1..9: note = Seed: VVVGAGDVG (KRAS G13D)
YVVYATDVH

SEQ ID NO: 99226 - protein, 9 aa, synthetic construct
  source 1..9: note = Seed: VVVGAGDVG (KRAS G13D)
YVVYATDVI

SEQ ID NO: 99227 - protein, 9 aa, synthetic construct
  source 1..9: note = Seed: VVVGAGDVG (KRAS G13D)
YVVYATDVK

SEQ ID NO: 99228 - protein, 9 aa, synthetic construct
  source 1..9: note = Seed: VVVGAGDVG (KRAS G13D)
YVVYATDVL

SEQ ID NO: 99229 - protein, 9 aa, synthetic construct
  source 1..9: note = Seed: VVVGAGDVG (KRAS G13D)
YVVYATDVM

SEQ ID NO: 99230 - protein, 9 aa, synthetic construct
  source 1..9: note = Seed: VVVGAGDVG (KRAS G13D)
YVVYATDVN

SEQ ID NO: 99231 - protein, 9 aa, synthetic construct
  source 1..9: note = Seed: VVVGAGDVG (KRAS G13D)
YVVYATDVQ

SEQ ID NO: 99232 - protein, 9 aa, synthetic construct
  source 1..9: note = Seed: VVVGAGDVG (KRAS G13D)
YVVYATDVR

SEQ ID NO: 99233 - protein, 9 aa, synthetic construct
  source 1..9: note = Seed: VVVGAGDVG (KRAS G13D)
YVVYATDVS

SEQ ID NO: 99234 - protein, 9 aa, synthetic construct
  source 1..9: note = Seed: VVVGAGDVG (KRAS G13D)
YVVYATDVT

SEQ ID NO: 99235 - protein, 9 aa, synthetic construct
  source 1..9: note = Seed: VVVGAGDVG (KRAS G13D)
YVVYATDVV

SEQ ID NO: 99236 - protein, 9 aa, synthetic construct
  source 1..9: note = Seed: VVVGAGDVG (KRAS G13D)
YVVYATDVY

SEQ ID NO: 99237 - protein, 9 aa, synthetic construct
  source 1..9: note = Seed: VVVGAGDVG (KRAS G13D)
YVVYAVDVA

SEQ ID NO: 99238 - protein, 9 aa, synthetic construct
  source 1..9: note = Seed: VVVGAGDVG (KRAS G13D)
YVVYAVDVG

SEQ ID NO: 99239 - protein, 9 aa, synthetic construct
  source 1..9: note = Seed: VVVGAGDVG (KRAS G13D)
YVVYAVDVH

SEQ ID NO: 99240 - protein, 9 aa, synthetic construct
  source 1..9: note = Seed: VVVGAGDVG (KRAS G13D)
YVVYAVDVL

SEQ ID NO: 99241 - protein, 9 aa, synthetic construct
  source 1..9: note = Seed: VVVGAGDVG (KRAS G13D)
YVVYAVDVM

SEQ ID NO: 99242 - protein, 9 aa, synthetic construct
  source 1..9: note = Seed: VVVGAGDVG (KRAS G13D)
YVVYAVDVN

SEQ ID NO: 99243 - protein, 9 aa, synthetic construct
  source 1..9: note = Seed: VVVGAGDVG (KRAS G13D)
YVVYAVDVQ

SEQ ID NO: 99244 - protein, 9 aa, synthetic construct
  source 1..9: note = Seed: VVVGAGDVG (KRAS G13D)
YVVYAVDVS

SEQ ID NO: 99245 - protein, 9 aa, synthetic construct
  source 1..9: note = Seed: VVVGAGDVG (KRAS G13D)
YVVYAVDVY

SEQ ID NO: 99246 - protein, 9 aa, Homo sapiens
  source 1..9: note = Native (KRAS G13D)
GDVGKSALT

SEQ ID NO: 99247 - protein, 9 aa, Homo sapiens
  source 1..9: note = Native (KRAS G13D)
LVVVGAGDV

SEQ ID NO: 99248 - protein, 9 aa, Homo sapiens
  source 1..9: note = Native (KRAS G13D)
VGAGDVGKS

SEQ ID NO: 99249 - protein, 9 aa, Homo sapiens
  source 1..9: note = Native (KRAS G13D)
VVVGAGDVG

SEQ ID NO: 99250 - protein, 15 aa, synthetic construct
  source 1..15: note = Seed: EYKLVVVGADGVGKS (KRAS G12D)
EYKFVVFGSDGAGKS

SEQ ID NO: 99251 - protein, 24 aa, synthetic construct
  source 1..24: note = Seed: EYKLVVVGADGVGKSALTIQLIQN (KRAS G12D)
EYKFVVIGNDGAGKSALTIQLIQN

SEQ ID NO: 99252 - protein, 15 aa, synthetic construct
  source 1..15: note = Seed: EYKLVVVGADGVGKS (KRAS G12D)
EYKFVVLGADGAGKS

SEQ ID NO: 99253 - protein, 20 aa, synthetic construct
  source 1..20: note = Seed: MTEYKLVVVGADGVGKSALT (KRAS G12D)
MTEYKFVVSGADGIGKSALT

SEQ ID NO: 99254 - protein, 20 aa, synthetic construct
  source 1..20: note = Seed: MTEYKLVVVGADGVGKSALT (KRAS G12D)
MTEYKFVVYGSDGIGKSALT

SEQ ID NO: 99255 - protein, 15 aa, synthetic construct
  source 1..15: note = Seed: EYKLVVVGAVGVGKS (KRAS G12V)
EYKFVVIGRVGHGKS

SEQ ID NO: 99256 - protein, 15 aa, synthetic construct
  source 1..15: note = Seed: EYKLVVVGAVGVGKS (KRAS G12V)
EYKFVVLGTVGHGKS

SEQ ID NO: 99257 - protein, 15 aa, synthetic construct
  source 1..15: note = Seed: EYKLVVVGAVGVGKS (KRAS G12V)
EYKFVVYGNVGMGKS

SEQ ID NO: 99258 - protein, 15 aa, synthetic construct
  source 1..15: note = Seed: EYKLVVVGAVGVGKS (KRAS G12V)
EYKIVVAGNVGIGKS

SEQ ID NO: 99259 - protein, 15 aa, synthetic construct
  source 1..15: note = Seed: TEYKLVVVGAVGVGK (KRAS G12V)
TEYKIVVMGNVGYGK

SEQ ID NO: 99260 - protein, 20 aa, synthetic construct
  source 1..20: note = Seed: MTEYKLVVVGARGVGKSALT (KRAS G12R)
MTEYKFVVFGSRGVGKSALT

SEQ ID NO: 99261 - protein, 20 aa, synthetic construct
  source 1..20: note = Seed: MTEYKLVVVGARGVGKSALT (KRAS G12R)
MTEYKFVVIGNRGVGKSALT

SEQ ID NO: 99262 - protein, 20 aa, synthetic construct
  source 1..20: note = Seed: MTEYKLVVVGARGVGKSALT (KRAS G12R)
MTEYKFVVIGVRGDGKSALT

SEQ ID NO: 99263 - protein, 20 aa, synthetic construct
  source 1..20: note = Seed: MTEYKLVVVGARGVGKSALT (KRAS G12R)
MTEYKFVVMGSRGAGKSALT

SEQ ID NO: 99264 - protein, 15 aa, synthetic construct
  source 1..15: note = Seed: VVVGARGVGKSALTI (KRAS G12R)
VVVIARGVPKSLLTI

SEQ ID NO: 99265 - protein, 15 aa, synthetic construct
  source 1..15: note = Seed: EYKLVVVGACGVGKS (KRAS G12C)
EYKFVVFGNCGAGKS

SEQ ID NO: 99266 - protein, 15 aa, synthetic construct
  source 1..15: note = Seed: EYKLVVVGACGVGKS (KRAS G12C)
EYKFVVSGACGVGKS

SEQ ID NO: 99267 - protein, 15 aa, synthetic construct
  source 1..15: note = Seed: EYKLVVVGACGVGKS (KRAS G12C)
EYKFVVSGNCGLGKS

SEQ ID NO: 99268 - protein, 15 aa, synthetic construct
  source 1..15: note = Seed: EYKLVVVGACGVGKS (KRAS G12C)
EYKLVVMGPCGAGKS

SEQ ID NO: 99269 - protein, 15 aa, synthetic construct
  source 1..15: note = Seed: KLVVVGACGVGKSAL (KRAS G12C)
KLVIVGICKVGHSAL

SEQ ID NO: 99270 - protein, 15 aa, synthetic construct
  source 1..15: note = Seed: EYKLVVVGAGDVGKS (KRAS G13D)
EYKFVVFGNGDLGKS

SEQ ID NO: 99271 - protein, 15 aa, synthetic construct
  source 1..15: note = Seed: EYKLVVVGAGDVGKS (KRAS G13D)
EYKFVVMGNGDSGKS

SEQ ID NO: 99272 - protein, 15 aa, synthetic construct
  source 1..15: note = Seed: EYKLVVVGAGDVGKS (KRAS G13D)
EYKFVVSGSGDVGKS

SEQ ID NO: 99273 - protein, 15 aa, synthetic construct
  source 1..15: note = Seed: EYKLVVVGAGDVGKS (KRAS G13D)
EYKIVVMGRGDMGKS

SEQ ID NO: 99274 - protein, 15 aa, Homo sapiens
  source 1..15: note = Native (KRAS G13D)
YKLVVVGAGDVGKSA

SEQ ID NO: 99275 - protein, 15 aa, Homo sapiens
  source 1..15: note = Native (KRAS G12D)
EYKLVVVGADGVGKS

SEQ ID NO: 99276 - protein, 24 aa, Homo sapiens
  source 1..24: note = Native (KRAS G12D)
EYKLVVVGADGVGKSALTIQLIQN

SEQ ID NO: 99277 - protein, 20 aa, Homo sapiens
  source 1..20: note = Native (KRAS G12D)
MTEYKLVVVGADGVGKSALT

SEQ ID NO: 99278 - protein, 15 aa, Homo sapiens
  source 1..15: note = Native (KRAS G12V)
EYKLVVVGAVGVGKS

SEQ ID NO: 99279 - protein, 15 aa, Homo sapiens
  source 1..15: note = Native (KRAS G12V)
TEYKLVVVGAVGVGK

SEQ ID NO: 99280 - protein, 20 aa, Homo sapiens
  source 1..20: note = Native (KRAS G12R)
MTEYKLVVVGARGVGKSALT

SEQ ID NO: 99281 - protein, 15 aa, Homo sapiens
  source 1..15: note = Native (KRAS G12R)
VVVGARGVGKSALTI

SEQ ID NO: 99282 - protein, 15 aa, Homo sapiens
  source 1..15: note = Native (KRAS G12C)
EYKLVVVGACGVGKS

SEQ ID NO: 99283 - protein, 15 aa, Homo sapiens
  source 1..15: note = Native (KRAS G12C)
KLVVVGACGVGKSAL

SEQ ID NO: 99284 - protein, 15 aa, Homo sapiens
  source 1..15: note = Native (KRAS G13D)
EYKLVVVGAGDVGKS

SEQ ID NO: 99285 - protein, 235 aa, synthetic construct
MRVTAPRTLILLLSGALALTETWAGSGGSGGGGSGGEYKFVVFGSDGAGKSGGSGGGGSGGEYKFVVIGNDGAGKSALTIQLIQNGGSGGGGSGGEYKFVVLGADGAGKSGGSGGGGSGGMTEYKFVVSGADGIGKSALTGGSGGGGSGGMTEYKFVVYGSDGIGKSALTGGSLGGGGSGIVGIVAGLAVLAVVVIGAVVATVMCRRKSSGGKGGSYSQAASSDSAQGSDVSLTA
